(19) United States
(12) Patent Application Publication
(10) Pub. No.: US 2023/0270840 A1
(43) Pub. Date: Aug. 31, 2023

(54) VIRAL GUIDE RNA DELIVERY

(71) Applicant: BEAM THERAPEUTICS INC., Boston, MA (US)

(72) Inventors: Fei Ran, Cambridge, MA (US); ChieYu Lin, Cambridge, MA (US)

(21) Appl. No.: 17/940,636

(22) Filed: Sep. 8, 2022

Related U.S. Application Data
(60) Provisional application No. 63/241,964, filed on Sep. 8, 2021.

(51) Int. Cl. A61K 39/205; C12N 7/00

(52) U.S. Cl. CPC A61K 39/205; C12N 7/00; C12N 2760/20121; C12N 2760/20152; C12N 2760/20171; C12N 2760/20143; A61K 2039/5256

(57) ABSTRACT

Provided herein are recombinant negative-strand RNA virus genomes (e.g., recombinant rabies virus genomes) and recombinant negative-strand RNA viruses (e.g., recombinant rabies viruses) and methods for their use in delivering a guide RNA and, optionally, a transgene, into a target cell. Also provided are packaging systems and methods of using the packaging systems to produce recombinant negative-strand RNA viruses.

### RELATED APPLICATIONS

[0001] This application claims the benefit of U.S. Provisional Patent Application Ser. No. 63/241,964, filed Sep. 8, 2021, the entire disclosure of which is hereby incorporated herein by reference.

### SEQUENCE LISTING

[0002] The instant application contains a Sequence Listing which has been submitted electronically in XML format and is hereby incorporated by reference in its entirety. Said XML file, created on May 19, 2023, is named 732097_BEAM9-003_ST26.xml and is 1,336,936 bytes in size.

### BACKGROUND

[0003] Viral-based guide RNA (gRNA) delivery has traditionally been mediated with DNA viruses (e.g., adenovirus), with said gRNA being transcribed from the DNA viral genome. These systems can take advantage of well characterized expression systems, such as U6 (Pol III promoter)- or T7 in vitro-systems. However, there are limited examples of gRNA delivery with negative-strand RNA viruses (e.g., rabies virus), and gRNA delivery with a flanking tRNA with a negative-strand RNA virus has not been reported.

[0004] Negative-strand RNA virus gRNA delivery presents unique challenges. Negative-strand RNA viruses do not have a DNA stage in their lifecycle, therefore DNA-based promoters cannot be used. Every transcriptional cassette in the negative-strand RNA virus genome is read by a RNA-dependent RNA polymerase (RdRp). The transcripts produced always have a 5′ cap and polyA tail, which may interfere with gRNA activity.

[0005] Accordingly, there is a need for novel viral gRNA delivery systems that are advantageous over current viral systems.

### SUMMARY

[0006] Provided herein are recombinant negative-strand RNA virus genomes (e.g., recombinant rabies virus genomes) and recombinant viral particles (e.g., recombinant rabies virus particles) comprising said recombinant negative-strand RNA virus genome, which can be used to transduce a target cell and express a guide RNA (gRNA) therein. The recombinant RNA virus genomes and viruses provided by the present disclosure find use as effective viral gRNA and transgene (e.g., a nucleobase editor) delivery systems. Also provided are viral packaging systems and methods of producing the recombinant viruses described herein.

[0007] In one aspect, the disclosure provides a recombinant negative-strand RNA virus genome, comprising a nucleic acid encoding a first guide RNA (gRNA) that comprises a 5′ end and a 3′ end; and a nucleic acid encoding a first transfer RNA (tRNA) positioned at one or both of the 3′ end of the nucleic acid encoding the first gRNA or of the 5′ end of the nucleic acid encoding the first gRNA.

[0008] In certain embodiments, the recombinant negative-strand RNA virus genome comprises a nucleic acid encoding a second tRNA.

[0009] In certain embodiments, the nucleic acid encoding the first tRNA is positioned at the 3′ end of the nucleic acid encoding the first gRNA; and the nucleic acid encoding the second tRNA is positioned at the 5′ end of the nucleic acid encoding the first gRNA.

[0010] In certain embodiments, the nucleotide sequence of the first tRNA and the nucleotide sequence of the second tRNA are at least 90%, 91%, 92%, 93%, 94%, 95%, 96%, 97%, 98%, 99%, or 100% identical.

[0011] In certain embodiments, the first tRNA and the second tRNA specify the same amino acid. In certain embodiments, the first tRNA and the second tRNA specify different amino acids.

[0012] In certain embodiments, the recombinant negative-strand RNA virus genome comprises two nucleic acids encoding the first tRNA. In certain embodiments, the recombinant negative-strand RNA virus genome comprises three nucleic acids encoding the first tRNA.

[0013] In certain embodiments, the recombinant negative-strand RNA virus genome comprises a nucleic acid encoding a second gRNA. In certain embodiments, the two or more nucleic acids encode identical gRNA. In certain embodiments, the two or more nucleic acids encode at least one different gRNA. In certain embodiments, the nucleotide sequence of the first gRNA and the nucleotide sequence of the second gRNA are at least 90%, 91%, 92%, 93%, 94%, 95%, 96%, 97%, 98%, 99%, or 100% identical. In certain embodiments, the first gRNA and the second gRNA specifically hybridize to the same target nucleic acid sequence. In certain embodiments, the first gRNA and the second gRNA specifically hybridize to different target nucleic acid sequence.

[0014] In certain embodiments, the first tRNA and/or the second tRNA is each selected from the group consisting of: tRNA-ala, tRNA-arg, tRNA-asn, tRNA-asp, tRNA-cys, tRNA-gln, tRNA-gly, tRNA-his, tRNA-ile, tRNA-leu, tRNA-lys, tRNA-met, tRNA-phe, tRNA-pro, tRNA-pyl, tRNA-sec, tRNA-ser, tRNA-thr, tRNA-trp, tRNA-tyr, and tRNA-val.

[0015] In certain embodiments, the nucleic acid encoding a first tRNA and/or second tRNA comprises any one of:

(tRNA-pro; SEQ ID NO: 4011)
GGCTCGTTGGTCTAGGGGTATGATTCTCGCTTAGGGTGCGAGAGGTCCCG
GGTTCAAATCCCGGACGAGCCC,
or a sequence at least 90% identical thereto;
(tRNA-thr; SEQ ID NO: 4012)
GGCTCCATAGCTCAGGGGTTAGAGCACTGGTCTTGTAAACCAGGGGTCGC
GAGTTCAATTCTCGCTGGGGCTT,
or a sequence at least 90% identical thereto;
(tRNA-gly G8; SEQ ID NO: 4013)
GCGTTGGTGGTATAGTGGTGAGCATAGCTGCCTTCCAAGCAGTTGACCCG
GGTTCGATTCCCGGCCAACGCA,
or a sequence at least 90% identical thereto;
(tRNA-gly G27; SEQ ID NO: 4014)
GCATGGGTGGTTCAGTGGTAGAATTCTCGCCTGCCACGCGGGAGGCCCGG
GTTCGATTCCCGGCCCATGCA,
or a sequence at least 90% identical thereto;
(tRNA-leu; SEQ ID NO: 4015)
GTCAGGATGGCCGAGCGGTCTAAGGCGCTGCGTTCAGGTCGCAGTCTCCC
CTAGAGGCGTGGGTTCGAATCCCACTCCTGACA,
or a sequence at least 90% identical thereto;
(tRNA-ile; SEQ ID NO: 4016)
GCTCCAGTGGCGCAATCGGTTAGCGCGCGGTACTTATAAGACAGTGCACC
TGTGAGCAATGCCGAGGTTGTGAGTTCAAGCCTCACCTGGAGCA,
or a sequence at least 90% identical thereto;
(tRNA-ser; SEQ ID NO: 4017)
GAAAAAGTCATGGAGGCCATGGGGTTGGCTTGAAACCAGCTTTGGGGGGT
TCGATTCCTTCCTTTTTTGTCT,
or a sequence at least 90% identical thereto;
(tRNA-arg; SEQ ID NO: 4018)
GGGCCAGTGGCGCAATGGATAACGCGTCTGACTACGGATCAGAAGATTCC
AGGTTCGACTCCTGGCTGGCTCGGTGTA,
or a sequence at least 90% identical thereto;
(tRNA-asp1; SEQ ID NO: 4019)
AAACAAGCGCAAGTGGTTTAGTGGTAAAATCCAACGTTGCCATCGTTGGG
CCCCCGGTTCGATTCCGGGCTTGCGCA,
or a sequence at least 90% identical thereto;
(tRNA-asp2; SEQ ID NO: 4020)
AACAAAGCACCAGTGGTCTAGTGGTAGAATAGTACCCTGCCACGGTACA
GACCCGGGTTCGATTCCCGGCTGGTGCA,
or a sequence at least 90% identical thereto;
or
(tRNA-asp D15; SEQ ID NO: 4021)
TCCTCGTTAGTATAGTGGTGAGTATCCCCGCCTGTCACGCGGGAGACCGG
GGTTCGATTCCCCGACGGGGAG,
or a sequence at least 90% identical thereto.

[0016] In certain embodiments, the first tRNA and/or the second tRNA comprise a tRNA-like structure.

[0017] In certain embodiments, the tRNA-like structure comprises a MALAT1-associated small cytoplasmic RNA (mascRNA).

[0018] In certain embodiments, the mascRNA is encoded by a nucleic acid comprising any one of:

(masc_Malat1; SEQ ID NO: X)
AAAAGCAAAAGATGCTGGTGGTTGGCACTCCTGGTTTCCAGGACGGGGTT
CAAATCCCTGCGGCGTCTTTGCTTT,
or a sequence at least 90% identical thereto;
(masc_liz38; SEQ ID NO: X)
AAAGACGCTGGTGGTTGGTGTTTCCAGGACGGGGTTCAAGTCCCTGCGGC
GTCCTCGC,
or a sequence at least 90% identical thereto;
(masc_liz40; SEQ ID NO: X)
GGCTCTGGTGGCTTCCAGGACGGGGTTCAAGTCCCTGCAGTGCCCTTGCT
GA,
or a sequence at least 90% identical thereto;
(masc_turk; SEQ ID NO: X)
AAAGGCGCTGGTGGTGGCACTCCCAGCGGGACGGGGTTCGAATCCCCGCG
GCGCCTCTGC,
or a sequence at least 90% identical thereto;
(hMALAT1.1; SEQ ID NO: X)
GAAGGTTTTTCTTTTCCTGAGAAAACAACACGTATTGTTTTCTCAGGTTT
TGCTTTTTGGCCTTTTTCTAGCTTAAAAAAAAAAGCAAAAGATGCTGGTG
GTTGGCACTCCTGGTTTCCAGGACGGGGTTCAAATCCCTGCGGCGTCTTT
GCTTT,
or a sequence at least 90% identical thereto;
(hMALAT1.2; SEQ ID NO: X)
GCAGGTGTTTCTTTTACTGAGTGCAGCCCATGGCCGCACTCAGGTTTTGC
TTTTCACCTTCCCATCTGTGAAAGAGTGAGCAGGAAAAAGCAAAAGGCGC
TGGTGGTGGCACGTCCAGCACGGCTGGGCCGGGGTTCGAGTCCCCGCAGT
GTTGCTGC,
or a sequence at least 90% identical thereto;
(chimp.1; SEQ ID NO: X)
GAAGGTTTTTCTTTTCCTGAGAAAACAACACGTTTTGTTTTCTCAGGTTT
TGCTTTTTGGCCTTTTTCTAGCTTAAAAAAAAAAGCAAAAGATGCTGGTG
GTTGGCACTCCTGGTTTCCAGGACAGGGTTCAAATCCCTGCGGCGTCTTT
GCTTT,
or a sequence at least 90% identical thereto;
(chimp.1 short; SEQ ID NO: X)
AAAGCAAAAGATGCTGGTGGTTGGCACTCCTGGTTTCCAGGACAGGGTTC
AAATCCCTGCGGCGTCTTTGCTTT,
or a sequence at least 90% identical thereto;
(chimp.2; SEQ ID NO: X)
GCAGGTGTTTCTTTTACTGAGTGCAGCCCATGGCCGCACTCAGGTTTTGC
TTTTCACCTTCCCATCTGTGAAAGAGTGAGCAGGAAAAAGCAAAAGGCGC
TGGTGGTGGCACGTCCAGCACGGCTGGGCCGGGGTTCGAGTCCCCGCAGT
GTTGCTGC,
or a sequence at least 90% identical thereto;
(MoTse.1; SEQ ID NO: X)
AAAGGTTTTTCTTTTCCTGAGAAAACAACCTTTTGTTTTCTCAGGTTTTG
CTTTTTGGCCTTTCCCTAGCTTTAAAAAAAAAAGCAAAAGACGCTGGTGG
CTGGCACTCCTGGTTTCCAGGACGGGGTTCAAGTCCCTGCGGTGTCTTTG
C,
or a sequence at least 90% identical thereto;
(MoTse.1 short; SEQ ID NO: X)
AAAGCAAAAGACGCTGGTGGCTGGCACTCCTGGTTTCCAGGACGGGGTTC
AAGTCCCTGCGGTGTCTTTGCTTGAC,
or a sequence at least 90% identical thereto;
or
(MoTse.2; SEQ ID NO: X)
GCAGGTGTTTCTTTTCCTGACCGCGGCTCATGGCCGCGCTCAGGTTTTGC
TTTTCACCTTTGTCTGAGAGAACGAACGTGAGCAGGAAAAAGCAAAAGGC
ACTGGTGGCGGCACGCCCGCACCTCGGGCCAGGGTTCGAGTCCCTGCAGT
ACCGTGC,
or a sequence at least 90% identical thereto.

[0019] In certain embodiments, the tRNA-like structure comprises a tRNA variant.

[0020] In certain embodiments, the tRNA variant comprises a substitution of one or more A and/or T nucleotides with a G or C nucleotide.

[0021] In certain embodiments, the tRNA variant comprises a lower A and/or T nucleotide content relative to a wild-type tRNA.

[0022] In certain embodiments, the tRNA variant is encoded by a nucleic acid comprising any one of:

(tRNA-pro var1; SEQ ID NO: X)
GGCTCGTTGGCCTAGGGGTATGGCTCCCGCTTAGGGTGCGGGAGGTCCCG
GGTTCAAATCCCGGACGAGCC,
or a sequence at least 90% identical thereto;
(tRNA-pro var2; SEQ ID NO: X)
GGCTCGTTGGCCTAGGGGTATGGCTGAAAAGGTCCCGGGTTCAAATCCCG
GACGAGCC,
or a sequence at least 90% identical thereto;
(tRNA-pro var3; SEQ ID NO: X)
GGCTCGTTGAAAGAAAAGGTCCCGGGTTCAAATCCCGGACGAGCC,
or a sequence at least 90% identical thereto;
(tRNA-thr var1; SEQ ID NO: X)
GGCTCCATAGCGCAGGGGTTAGCGCACCGGTCTTGTAAACCGGGGGTCGC
GAGTTCAATTCTCGCTGGGGCTT,
or a sequence at least 90% identical thereto;
(tRNA-thr var2; SEQ ID NO: X)
GGCTCCATAGCGCAGGGGTTAGCGCAGAAAGGGTCGCGAGTTCAATTCTC
GCTGGGGCTT,
or a sequence at least 90% identical thereto;
or
(tRNA-thr var3; SEQ ID NO: X)
GGCTCCATAGAAAGAAAGAAAGGGTCGCGAGTTCAATTCTCGCTGGGGCT
T,
or a sequence at least 90% identical thereto.

[0023] In certain embodiments, the tRNA-like structure comprises a tRNA fragment.

[0024] In certain embodiments, the tRNA-like structure comprises a viral tRNA-like structure (vtRNA).

[0025] In certain embodiments, the vtRNA is encoded by a nucleic acid comprising any one of:

(vtRNA-1; SEQ ID NO: X)
GCCAGAGTAGCTCAATTGGTAGAGCAACAGGTCACCGATCCTGGTGGTTC
TCGGTTCAAGTCCGAGCTCTGGTC,
or a sequence at least 90% identical thereto;
(vtRNA-2; SEQ ID NO: X)
GCCAGGGTAGCTCAATCGGTAGAGCAGCGGTTCCTGGAGTCCGCTGGTTC
TCGGTTCAAGCCCGAGCCCTGGTTG,
or a sequence at least 90% identical thereto;
(vtRNA-3; SEQ ID NO: X)
GTCGGGGTAGCTCAAATGGTAGAGTGGCAGGCCAACATAGCCAGCAGATC
TCGGTTCAAACCCGAGCCCTGACCA,
or a sequence at least 90% identical thereto;
(vtRNA-4; SEQ ID NO: X)
GTCGGGGTAGCTCAATTGGTAGAGCGGCAGGCTCATCCCCTGCAGGTTCT
CGGTTCAATCCCGGGTCCCGACGC,
or a sequence at least 90% identical thereto;
(vtRNA-5; SEQ ID NO: X)
GCCAGGGTAGCTCAATTGGTAGAGCATCAGGCTAGTATCCTGTCGGTTCC
GGTTCAAGTCCGGGCCCTGGTTA,
or a sequence at least 90% identical thereto;
(vtRNA-6; SEQ ID NO: X)
GCCAGCGTAGCTCAATTGTTAGAGCAGCGGCCACCAAGCCTGCAGGTTCT
CGGTTCAAGTCCGGGCGCTGGCAT,
or a sequence at least 90% identical thereto;
(vtRNA-7; SEQ ID NO: X)
GCCAGGGTAGCTCAATTGGTAGAGCGGCAGACACCACCTACGTGGTCTAG
TCTGTGGATCTCGGTTCAAGTCCGAGTCCTGGCCA,
or a sequence at least 90% identical thereto;
(vtRNA-7; SEQ ID NO: X)
GCCAGGGTAGCTCAATTGGTAGAGCGGCAGACACCACCTACGTGGTCTAG
TCTGTGGATCTCGGTTCAAGTCCGAGTCCTGGCCA,
or a sequence at least 90% identical thereto;
or
(vtRNA-8; SEQ ID NO: X)
ACCAGAGTGGCTCACCTGGTAGAGCACCAGGCTGCCCATCCTGTTGGTTC
TCGGTTCAAATCCGAGCTCTGGTGA,
or a sequence at least 90% identical thereto.

[0026] In certain embodiments, the recombinant negative-strand RNA virus genome comprises a nucleic acid encoding a negative-strand RNA virus gene.

[0027] In certain embodiments, the recombinant negative-strand RNA virus genome further comprises a nucleic acid encoding a transgene.

[0028] In certain embodiments, the nucleic acid encoding the first gRNA and the nucleic acid encoding the first tRNA are positioned between two nucleic acids each encoding a negative-strand RNA virus gene.

[0029] In certain embodiments, the nucleic acid encoding the first gRNA and the nucleic acid encoding the first tRNA are positioned between two nucleic acids each encoding a transgene.

[0030] In certain embodiments, the nucleic acid encoding the first gRNA and the nucleic acid encoding the first tRNA are positioned between a nucleic acid encoding a negative-strand RNA virus gene and a nucleic acid encoding a transgene.

[0031] In certain embodiments, the recombinant negative-strand RNA virus genome comprises a gRNA expression cassette comprising, from 3′ to 5′, a negative-strand RNA virus transcription initiation signal, a nucleic acid encoding a tRNA, a nucleic acid encoding a gRNA, and a transcription termination polyadenylation signal.

[0032] In certain embodiments, the recombinant negative-strand RNA virus genome comprises a gRNA expression cassette comprising, from 3′ to 5′, a negative-strand RNA virus transcription initiation signal, a nucleic acid encoding the first tRNA, a nucleic acid encoding the first gRNA, a nucleic acid encoding a second tRNA, and a transcription termination polyadenylation signal.

[0033] In certain embodiments, the recombinant negative-strand RNA virus genome comprises a gRNA expression cassette comprising, from 3′ to 5′, a negative-strand RNA virus transcription initiation signal, a nucleic acid encoding the first tRNA, a nucleic acid encoding the first gRNA, a nucleic acid encoding a second tRNA, a nucleic acid encoding a second gRNA, and a transcription termination polyadenylation signal.

[0034] In certain embodiments, the recombinant negative-strand RNA virus genome comprises a gRNA expression cassette comprising, from 3′ to 5′, a negative-strand RNA virus transcription initiation signal, a nucleic acid encoding the first tRNA, a nucleic acid encoding the first gRNA, a nucleic acid encoding a second tRNA, a nucleic acid encoding a second gRNA, and a transcription termination polyadenylation signal.

[0035] In certain embodiments, the recombinant negative-strand RNA virus genome comprises a gRNA expression cassette comprising, from 3′ to 5′, a negative-strand RNA virus transcription initiation signal, a nucleic acid encoding the first tRNA, a nucleic acid encoding the first gRNA, a nucleic acid encoding a second tRNA, a nucleic acid encoding a second gRNA, a nucleic acid encoding a third tRNA, and a transcription termination polyadenylation signal.

[0036] In certain embodiments of the gRNA expression cassette, the nucleic acid encoding the first tRNA, second tRNA, and/or third tRNA are identical. In certain embodiments of the gRNA expression cassette, the nucleic acid encoding the first tRNA, second tRNA, and/or third tRNA are different. In certain embodiments of the gRNA expression cassette, the nucleotide sequence of the first tRNA and the nucleotide sequence of the second tRNA are at least 90%, 91%, 92%, 93%, 94%, 95%, 96%, 97%, 98%, 99%, or 100% identical. In certain embodiments of the gRNA expression cassette, the first tRNA and the second tRNA specify the same amino acid. In certain embodiments of the gRNA expression cassette, the first tRNA and the second tRNA specify different amino acids. In certain embodiments of the gRNA expression cassette, the nucleic acid encoding the first gRNA and/or second gRNA are identical. In certain embodiments of the gRNA expression cassette, the nucleic acid encoding the first gRNA and/or second gRNA are different. In certain embodiments of the gRNA expression cassette, the nucleotide sequence of the first gRNA and the nucleotide sequence of the second gRNA are at least 90%, 91%, 92%, 93%, 94%, 95%, 96%, 97%, 98%, 99%, or 100% identical. In certain embodiments of the gRNA expression cassette, the first gRNA and the second gRNA specifically hybridize to the same target nucleic acid sequence. In certain embodiments of the gRNA expression cassette, the first gRNA and the second gRNA specifically hybridize to different target nucleic acid sequence. In certain embodiments of the gRNA expression cassette, the transcription termination polyadenylation signal comprises an endogenous transcription termination polyadenylation signal. In certain embodiments of the gRNA expression cassette, the transcription termination polyadenylation signal comprises a heterologous transcription termination polyadenylation signal.

[0037] In certain embodiments, the negative-strand RNA virus genome is a recombinant lyssavirus genome.

[0038] In certain embodiments, the recombinant lyssavirus genome is a recombinant rabies virus genome.

[0039] In one aspect, the disclosure provides a recombinant negative-strand RNA virus genome, comprising: a nucleic acid encoding a first guide RNA (gRNA) that comprises a 5′ end and a 3′ end; a nucleic acid encoding a first transfer RNA (tRNA) positioned at one or both of the 3′ end of the nucleic acid encoding the first gRNA or the 5′ end of the nucleic acid encoding the first gRNA; and a nucleic acid encoding a transgene (e.g., a therapeutic transgene).

[0040] In certain embodiments, the transgene comprises a nucleobase editor.

[0041] In certain embodiments, the recombinant rabies virus genome comprises a nucleic acid encoding a therapeutic transgene, wherein: the genome lacks a G gene encoding for a rabies virus glycoprotein or a functional variant thereof; and/or the genome lacks an L gene encoding for a rabies virus polymerase or a functional variant thereof. In certain embodiments, the genome lacks a G gene encoding for a rabies virus glycoprotein or a functional variant thereof. In certain embodiments, the genome lacks a G gene encoding for a rabies virus glycoprotein or a functional variant thereof, and wherein the genome lacks an L gene encoding for a rabies virus polymerase or a functional variant thereof.

[0042] In certain embodiments, the genome comprises: an N gene encoding for a rabies virus nucleoprotein or a functional variant thereof; a P gene encoding for a rabies virus phosphoprotein or a functional variant thereof; and an M gene encoding for a rabies virus matrix protein or a functional variant thereof.

[0043] In one aspect, the disclosure provides a messenger RNA (mRNA) expressed from the recombinant negative-strand RNA virus genome described above.

[0044] In certain embodiments, the mRNA comprises a first guide RNA (gRNA) that comprises a 5′ end and a 3′ end; and a first transfer RNA (tRNA) positioned at one or both of the 3′ end of the first gRNA or of the 5′ end of the first gRNA.

[0045] In another aspect, the disclosure provides a recombinant rabies virus particle, comprising a rabies virus glycoprotein and the recombinant rabies virus genome described above.

[0046] In another aspect, the disclosure provides a recombinant rabies virus particle, comprising: a rabies virus glycoprotein; and a recombinant rabies virus genome comprising a nucleic acid encoding a first guide RNA (gRNA) that comprises a 5′ end and a 3′ end, and a nucleic acid encoding a first transfer RNA (tRNA) positioned at one or both of the 3′ end of the nucleic acid encoding the first gRNA or the 5′ end of the nucleic acid encoding the first gRNA.

[0047] In certain embodiments, the genome lacks a G gene encoding for a rabies virus glycoprotein or a functional variant thereof; and/or the genome lacks an L gene encoding for a rabies virus polymerase or a functional variant thereof. In certain embodiments, the genome lacks a G gene encoding for a rabies virus glycoprotein or a functional variant thereof. In certain embodiments, the genome lacks a G gene encoding for a rabies virus glycoprotein or a functional variant thereof, and wherein the genome lacks an L gene encoding for a rabies virus polymerase or a functional variant thereof.

[0048] In certain embodiments, the genome comprises: an N gene encoding for a rabies virus nucleoprotein or a functional variant thereof; a P gene encoding for a rabies virus phosphoprotein or a functional variant thereof; and an M gene encoding for a rabies virus matrix protein or a functional variant thereof.

[0049] In certain embodiments, each of the genes are operably linked to a transcriptional regulatory element. In certain embodiments, the transcriptional regulatory element comprises a transcription initiation signal. In certain embodiments, the transcription initiation signal is exogenous to the rabies virus. In certain embodiments, the transcription initiation signal is endogenous to the rabies virus.

[0050] In certain embodiments, each of the genes are operably linked to a transcription termination polyadenylation signal.

[0051] In certain embodiments, the therapeutic transgene comprises a gene editing system or gene editing protein.

[0052] In certain embodiments, the gene editing system is selected from the group consisting of a Clustered Regulatory Interspaced Short Palindromic Repeat (CRISPR) system, a zinc finger nuclease (ZFN), a meganuclease, and a Transcription Activator-Like Effector-based Nucleases (TALEN). In certain embodiments, the gene editing system is a CRISPR system.

[0053] In certain embodiments, the CRISPR-system comprises a nucleobase editor comprising a polynucleotide programmable nucleotide binding domain and a nucleobase editing domain.

[0054] In certain embodiments, the nucleobase editing domain is an adenosine deaminase, cytidine deaminase, or a functional variant thereof. In certain embodiments, the nucleobase editing domain is an adenosine deaminase. In certain embodiments, the adenosine deaminase is ABE7.10 or ABE8.20.

[0055] In certain embodiments, the DNA binding domain is a Cas9 polypeptide, a Cas12 polypeptide, or a functional variant thereof.

[0056] In certain embodiments, the CRISPR-system further comprises a guide RNA (gRNA).

[0057] In certain embodiments, the therapeutic transgene comprises a therapeutic polypeptide and/or a therapeutic nucleic acid.

[0058] In certain embodiments, the therapeutic polypeptide and/or therapeutic nucleic acid is secreted.

[0059] In certain embodiments, the therapeutic transgene is operably linked to a transcriptional regulatory element. In certain embodiments, the transcriptional regulatory element comprises a transcription initiation signal. In certain embodiments, the transcription initiation signal is exogenous to the rabies virus. In certain embodiments, the transcription initiation signal is endogenous to the rabies virus. In certain embodiments, the therapeutic transgene is operably linked to a transcription termination polyadenylation signal.

[0060] In one aspect, the disclosure provides a pharmaceutical composition comprising the recombinant virus particle described above.

[0061] In one aspect, the disclosure provides a method for expressing a therapeutic transgene in a target cell, comprising transducing a target cell with the recombinant virus particle described above.

[0062] In one aspect, the disclosure provides a method for expressing a nucleobase editor and guide RNA (gRNA) in a target cell, comprising transducing a target cell with a recombinant rabies virus particle, wherein the recombinant virus particle comprises: a rabies virus glycoprotein; and a recombinant rabies virus genome comprising: a nucleic acid encoding a nucleobase editor comprising a polynucleotide programmable nucleotide binding domain and a nucleobase editing domain; a nucleic acid encoding a first gRNA that comprises a 5′ end and a 3′ end; and a nucleic acid encoding a first tRNA positioned at one or both of the 3′ end of the nucleic acid encoding the first gRNA or the 5′ end of the nucleic acid encoding the first gRNA.

[0063] In certain embodiments of the method, the genome lacks a G gene encoding for a rabies virus glycoprotein or a functional variant thereof; and/or the genome lacks an L gene encoding for a rabies virus polymerase or a functional variant thereof.

[0064] In certain embodiments of the method, the genome comprises: an N gene encoding for a rabies virus nucleoprotein or a functional variant thereof; a P gene encoding for a rabies virus phosphoprotein or a functional variant thereof; and an M gene encoding for a rabies virus matrix protein or a functional variant thereof.

[0065] In certain embodiments of the method, each of the genes and/or nucleic acids are operably linked to a transcriptional regulatory element. In certain embodiments of the method, the transcriptional regulatory element comprises a transcription initiation signal. In certain embodiments of the method, the transcription initiation signal is exogenous to the rabies virus. In certain embodiments of the method, the transcription initiation signal is endogenous to the rabies virus. In certain embodiments of the method, each of the genes and/or nucleic acids are operably linked to a transcription termination polyadenylation signal.

[0066] In certain embodiments of the method, the nucleobase editing domain is an adenosine deaminase, cytidine deaminase, or a functional variant thereof.

[0067] In certain embodiments of the method, the base editor is an adenosine deaminase. In certain embodiments of the method, the adenosine deaminase is ABE7.10 or ABE8.20.

[0068] In certain embodiments of the method, the DNA binding domain is a Cas9 polypeptide, a Cas12 polypeptide, or a functional variant thereof.

[0069] In certain embodiments of the method, the gRNA is capable of targeting a genomic locus of the target cell.

[0070] In certain embodiments of the method, the target cell is transduced ex vivo. In certain embodiments of the method, the target cell is a human cell. In certain embodiments of the method, the target cell is obtained from a human. In certain embodiments of the method, the target cell is autologous to the human. In certain embodiments of the method, the target cell is allogeneic to the human.

[0071] In certain embodiments of the method, the target cell is transduced in vivo. In certain embodiments of the method, the target cell is a human cell. In certain embodiments of the method, the target cell is a neuronal cell, an epithelial cell, or a hepatocyte. In certain embodiments of the method, the target cell is in a human.

[0072] In one aspect, the disclosure provides a packaging system for the recombinant preparation of a rabies virus particle, wherein the packaging system comprises: an N gene encoding for a rabies virus nucleoprotein or a functional variant thereof; a P gene encoding for a rabies virus phosphoprotein or a functional variant thereof; an L gene encoding for a rabies virus polymerase or a functional variant thereof; and a recombinant rabies virus genome, wherein: the genome comprises a nucleic acid encoding a first guide RNA (gRNA) that comprises a 5′ end and a 3′ end; and the genome comprises a nucleic acid encoding a first transfer RNA (tRNA) positioned at one or both of the 3′ end of the nucleic acid encoding the first gRNA or the 5′ end of the nucleic acid encoding the first gRNA.

[0073] In certain embodiments of the packaging system, the genome lacks a G gene encoding for a rabies virus glycoprotein or a functional variant thereof; and/or the genome lacks an L gene encoding for a rabies virus polymerase or a functional variant thereof.

[0074] In certain embodiments of the packaging system, the recombinant rabies virus genome further comprises a nucleic acid encoding a transgene or therapeutic transgene.

[0075] In certain embodiments of the packaging system, the recombinant rabies virus genome is comprised within a virus genome vector.

[0076] In certain embodiments of the packaging system, the N, P, and L genes are each comprised within a separate vector.

[0077] In certain embodiments of the packaging system, each of the N, P, and L genes are operably linked to a transcriptional regulatory element. In certain embodiments of the packaging system, the transcriptional regulatory element comprises a promoter and/or enhancer. In certain embodiments of the packaging system, the promoter is a constitutive promoter. In certain embodiments of the packaging system, the promoter is an elongation factor 1α promoter.

[0078] In certain embodiments of the packaging system, the separate vectors are each contained within a separate transfecting plasmid.

[0079] In certain embodiments of the packaging system, the N, P, and L genes are comprised within a single vector.

[0080] In certain embodiments of the packaging system, the single vector comprises a first expression cassette comprising the N and P genes, and a second expression cassette comprising the L gene.

[0081] In certain embodiments of the packaging system, the first expression cassette comprises from 5′ to 3′: a transcriptional regulatory element; the P gene; and the N gene.

[0082] In certain embodiments of the packaging system, the first expression cassette comprises from 5′ to 3′: a transcriptional regulatory element; the P gene; a ribosomal skipping element; and the N gene.

[0083] In certain embodiments of the packaging system, the ribosomal skipping element is an IRES element. In certain embodiments of the packaging system, the ribosomal skipping element is a 2A element.

[0084] In certain embodiments of the packaging system, the second expression cassette comprises from 5′ to 3′: a transcriptional regulatory element; and the L gene.

[0085] In certain embodiments of the packaging system, the transcriptional regulatory element comprises a promoter and/or enhancer. In certain embodiments of the packaging system, the promoter is a constitutive promoter. In certain embodiments of the packaging system, the promoter is an elongation factor 1a promoter.

[0086] In certain embodiments of the packaging system, the first and the second expression cassettes are in opposite orientations in the vector.

[0087] In certain embodiments of the packaging system, the single vector is contained within a single transfecting plasmid.

[0088] In certain embodiments of the packaging system, the packaging system further comprises an M gene encoding for a rabies virus matrix protein or a functional variant thereof. In certain embodiments of the packaging system, the M gene is comprised within a vector. In certain embodiments of the packaging system, the M gene is operably linked to a transcriptional regulatory element. In certain embodiments of the packaging system, the transcriptional regulatory element comprises a promoter and/or enhancer. In certain embodiments of the packaging system, the vector comprising the M gene is contained within a transfecting plasmid.

[0089] In certain embodiments of the packaging system, the packaging system further comprises a G gene encoding for a rabies virus glycoprotein or a functional variant thereof. In certain embodiments of the packaging system, the G gene is comprised within a vector. In certain embodiments of the packaging system, the G gene is operably linked to a transcriptional regulatory element. In certain embodiments of the packaging system, the transcriptional regulatory element comprises a promoter and/or enhancer. In certain embodiments of the packaging system, the vector comprising the G gene is contained within a transfecting plasmid.

[0090] In one aspect, the disclosure provides a method for producing a recombinant rabies virus particle, the method comprising introducing the packaging system described above into a cell under conditions operative for enveloping the recombinant rabies virus genome to form the recombinant rabies virus particle.

[0091] In certain embodiments of the method, the introducing is mediated by electroporation, nucleofection, or lipofection.

[0092] In one aspect, the disclosure provides a recombinant rabies virus particle packaging cell comprising the packaging system described above.

[0093] In one aspect, the disclosure provides a method of treating a disease or disorder in a subject, the method comprising administering the recombinant rabies virus particle described above, or the pharmaceutical composition described above to the subject. In certain embodiments of the method, the disease or disorder is a neurologic disease or disorder. In certain embodiments of the method, the disease or disorder is an ophthalmic disease or disorder.

[0094] In one aspect, the disclosure provides a use of the recombinant rabies virus described, or the pharmaceutical composition described, in the manufacture of a medicament for treating a disease or disorder in a subject.

### BRIEF DESCRIPTION OF THE DRAWINGS

[0095] FIG. 1 is a chart showing relative infectivity on 293T cells from equal volumes of virus-containing supernatant harvested on the indicated days from various stable cell lines.

[0096] FIG. 2A is a schematic depicting the VIR218 replicon.

[0097] FIG. 2B is a schematic depicting the production and infection scheme for recombinant rabies virus particle mediated gene delivery.

[0098] FIG. 2C is a chart depicting that a recombinant rabies virus particle comprising a recombinant rabies virus genome encoding a nucleobase editor can effect gene editing of a target sequence.

[0099] FIG. 3A is a schematic depicting the organization of a recombinant rabies viral genome comprising a gRNA, polynucleotide programmable nucleotide binding domain, and nucleobase editors.

[0100] FIG. 3B is a schematic depicting a gRNA-tRNA expression cassette encoding a gRNA between two tRNA sequences with arrows indicating cleavage sites of the RNA.

[0101] FIG. 3C is a schematic depicting a gRNA-tRNA expression cassette encoding gRNAs (a first gRNA and a second gRNA), wherein the first gRNA is between a first tRNA and a second tRNA, followed by the second gRNA.

[0102] FIG. 3D is a schematic depicting a gRNA-tRNA expression cassette encoding gRNAs (a first gRNA and a second gRNA), wherein the first gRNA is between a first tRNA and a second tRNA, and the second gRNA is between a second tRNA and a third tRNA.

[0103] FIG. 3E is a chart depicting % infection and % A>G base editing in HEK cells transduced with a recombinant rabies virus particle comprising a recombinant rabies virus genome encoding a nucleobase editor and gRNAs encoded between multiple tRNAs. The % base editing was measured at a Hek2 site and IEDG site targeted by a Hek2-targeting gRNA and a IEDG-targeting gRNA.

[0104] FIG. 4A is a chart depicting % A>G base editing in 293T cells co-transfected with a vector expressing a nucleobase editor and a vector expressing a gRNA between flanking tRNAs (termed “flank” in the data, representing a tRNA-gRNA-tRNA format) or non-flanked gRNAs (i.e., a tRNA-gRNA). The % base editing was measured at a Hek2 site targeted by a Hek2-targeting gRNA.

[0105] FIG. 4B is a chart depicting % A>G base editing in 293T cells co-transfected with a vector expressing a nucleobase editor and a vector expressing a gRNA connected to a MALAT1-associated small cytoplasmic RNA (mascRNA) derived from various species. The % base editing was measured at a Hek2 site targeted by a Hek2-targeting gRNA.

[0106] FIG. 4C is a chart depicting % A>G base editing in 293T cells co-transfected with a vector expressing a nucleobase editor and a vector expressing tRNA-gRNA variants. The % base editing was measured at a Hek2 site targeted by a Hek2-targeting gRNA.

[0107] FIG. 4D is a chart depicting % A>G base editing in 293T cells co-transfected with a vector expressing a nucleobase editor and a vector expressing tRNA fragments, RnaseZ, or RnaseP substrates connected to gRNAs. The % base editing was measured at a Hek2 site targeted by a Hek2-targeting gRNA.

[0108] FIG. 5 is a chart depicting % A>G base editing in 293T cells co-transfected with a vector expressing a nucleobase editor and a vector expressing viral tRNA-like structures (vtRNAs) from gamma-Herpes virus (GHV68) connected to gRNAs. The % base editing was measured at a Hek2 site targeted by a Hek2-targeting gRNA, a SOD1 site targeted by a SOD1-targeting gRNA, and a ALAS1 site targeted by a ALAS1-targeting gRNA.

[0109] FIG. 6A is a schematic depicting tRNA-gRNA cassette placement within different RABV genome architectures that co-express a nucleobase editor.

[0110] FIG. 6B is a chart depicting % A>G base editing in 293T cells transduced with a recombinant rabies virus particle comprising a recombinant rabies virus genome encoding a nucleobase editor and a tRNA(Gly)-gRNA cassette inserted at several positions in different RABV genome architectures. The % base editing was measured at a ALAS1 site and a SOD1 site.

### DETAILED DESCRIPTION

[0111] Provided herein is a recombinant negative-strand RNA virus genome that comprises a nucleic acid encoding a first guide RNA (gRNA) that comprises a 5′ end and a 3′ end; and a nucleic acid encoding a first transfer RNA (tRNA) positioned at one or both of the 3′ end of the nucleic acid encoding the first gRNA or the 5′ end of the nucleic acid encoding the first gRNA.

[0112] It is to be understood that the methods described herein are not limited to particular methods and experimental conditions disclosed herein as such methods and conditions may vary. It is also to be understood that the terminology used herein is for the purpose of describing particular embodiments only, and is not intended to be limiting. The methods described herein use conventional molecular and cellular biological and immunological techniques that are well within the skill of the ordinary artisan. Such techniques are well known to the skilled artisan and are explained in the scientific literature.

### A. Definitions

[0113] Unless defined otherwise, all technical and scientific terms used herein have the meaning commonly understood by a person skilled in the art to which this invention belongs. The following references provide one of skill with a general definition of many of the terms used in this invention: Singleton et al., Dictionary of Microbiology and Molecular Biology (2nd ed. 1994); The Cambridge Dictionary of Science and Technology (Walker ed., 1988); The Glossary of Genetics, 5th Ed., R. Rieger et al. (eds.), Springer Verlag (1991); and Hale & Marham, The Harper Collins Dictionary of Biology (1991). As used herein, the following terms have the meanings ascribed to them below, unless specified otherwise.

[0114] By “adenosine deaminase” is meant a polypeptide or fragment thereof capable of catalyzing the hydrolytic deamination of adenine or adenosine. In some embodiments, the deaminase or deaminase domain is an adenosine deaminase catalyzing the hydrolytic deamination of adenosine to inosine or deoxy adenosine to deoxyinosine. In some embodiments, the adenosine deaminase catalyzes the hydrolytic deamination of adenine or adenosine in deoxyribonucleic acid (DNA). The adenosine deaminases (e.g. engineered adenosine deaminases, evolved adenosine deaminases) provided herein may be from any organism, such as a bacterium.

[0115] By “Adenosine Deaminase Base Editor 8 (ABE8) polypeptide” or “ABE8” is meant a base editor as defined herein comprising an adenosine deaminase variant comprising an alteration at amino acid position 82 and/or 166 of the following reference sequence:

(SEQ ID NO: 8)
MSEVEFSHEYWMRHALTLAKRARDEREVPVGAVLVLNNRVIGEGWNRAIG
LHDPTAHAEIMALRQGGLVMQNYRLIDATLYVTFEPCVMCAGAMIHSRIG
RWVFGVRNAKTGAAGSLMDVLHYPGMNHRVEITEGILADECAALLCYFFR
MPRQVFNAQKKAQSSTD

[0116] In some embodiments, ABE8 comprises further alterations, as described herein, relative to the reference sequence.

[0117] By “Adenosine Deaminase Base Editor 8 (ABE8) polynucleotide” is meant a polynucleotide encoding an ABE8.

[0118] “Administering” is referred to herein as providing one or more compositions described herein to a patient or a subject.

[0119] By “agent” is meant any small molecule chemical compound, antibody, nucleic acid molecule, or polypeptide, or fragments thereof.

[0120] By “alteration” is meant a change (increase or decrease) in the level, structure, or activity of an analyte, gene or polypeptide as detected by standard art known methods such as those described herein. As used herein, an alteration includes a 10% change in expression levels, a 25% change, a 40% change, and a 50% or greater change in expression levels. In some embodiments, an alteration includes an insertion, deletion, or substitution of a nucleobase or amino acid.

[0121] By “ameliorate” is meant decrease, suppress, attenuate, diminish, arrest, or stabilize the development or progression of a disease.

[0122] By “analog” is meant a molecule that is not identical, but has analogous functional or structural features. For example, a polypeptide analog retains the biological activity of a corresponding naturally-occurring polypeptide, while having certain biochemical modifications that enhance the analog's function relative to a naturally occurring polypeptide. Such biochemical modifications could increase the analog's protease resistance, membrane permeability, or half-life, without altering, for example, ligand binding. An analog may include an unnatural amino acid.

[0123] By “base editor (BE),” or “nucleobase editor polypeptide (NBE)” is meant an agent that binds a polynucleotide and has nucleobase modifying activity. In various embodiments, the base editor comprises a nucleobase modifying polypeptide (e.g., a deaminase) and a polynucleotide programmable nucleotide binding domain (e.g., Cas9 or Cpf1) in conjunction with a guide polynucleotide (e.g., guide RNA (gRNA)). Representative nucleic acid and protein sequences of base editors are provided in the Sequence Listing as SEQ ID NOs: 274-283. By “base editing activity” is meant acting to chemically alter a base within a polynucleotide.

[0124] In one embodiment, a first base is converted to a second base. In one embodiment, the base editing activity is cytidine deaminase activity, e.g., converting target C·G to T·A. In another embodiment, the base editing activity is adenosine or adenine deaminase activity, e.g., converting A·T to G·C.

[0125] The term “base editor system” refers to an intermolecular complex for editing a nucleobase of a target nucleotide sequence. In various embodiments, the base editor (BE) system comprises (1) a polynucleotide programmable nucleotide binding domain, a deaminase domain (e.g., cytidine deaminase or adenosine deaminase) for deaminating nucleobases in the target nucleotide sequence; and (2) one or more guide polynucleotides (e.g., guide RNA) in conjunction with the polynucleotide programmable nucleotide binding domain. In various embodiments, the base editor (BE) system comprises a nucleobase editor domain selected from an adenosine deaminase or a cytidine deaminase, and a domain having nucleic acid sequence specific binding activity. In some embodiments, the base editor system comprises (1) a base editor (BE) comprising a polynucleotide programmable DNA binding domain and a deaminase domain for deaminating one or more nucleobases in a target nucleotide sequence; and (2) one or more guide RNAs in conjunction with the polynucleotide programmable DNA binding domain. In some embodiments, the polynucleotide programmable nucleotide binding domain is a polynucleotide programmable DNA binding domain. In some embodiments, the base editor is a cytidine base editor (CBE). In some embodiments, the base editor is an adenine or adenosine base editor (ABE). In some embodiments, the base editor is an adenine or adenosine base editor (ABE) or a cytidine base editor (CBE).

[0126] By “base editing activity” is meant acting to chemically alter a base within a polynucleotide. In one embodiment, a first base is converted to a second base. In one embodiment, the base editing activity is cytidine deaminase activity, e.g., converting target C·G to T·A. In another embodiment, the base editing activity is adenosine deaminase activity, e.g., converting A·T to G·C.

[0127] The term “Cas9” or “Cas9 domain” refers to an RNA guided nuclease comprising a Cas9 protein, or a fragment thereof (e.g., a protein comprising an active, inactive, or partially active DNA cleavage domain of Cas9, and/or the gRNA binding domain of Cas9). A Cas9 nuclease is also referred to sometimes as a casnl nuclease or a CRISPR (clustered regularly interspaced short palindromic repeat) associated nuclease.

[0128] The term “conservative amino acid substitution” or “conservative mutation” refers to the replacement of one amino acid by another amino acid with a common property. A functional way to define common properties between individual amino acids is to analyze the normalized frequencies of amino acid changes between corresponding proteins of homologous organisms (Schulz, G. E. and Schirmer, R. H., Principles of Protein Structure, Springer-Verlag, New York (1979)). According to such analyses, groups of amino acids can be defined where amino acids within a group exchange preferentially with each other, and therefore resemble each other most in their impact on the overall protein structure (Schulz, G. E. and Schirmer, R. H., supra). Non-limiting examples of conservative mutations include amino acid substitutions of amino acids, for example, lysine for arginine and vice versa such that a positive charge can be maintained; glutamic acid for aspartic acid and vice versa such that a negative charge can be maintained; serine for threonine such that a free —OH can be maintained; and glutamine for asparagine such that a free —NH₂ can be maintained.

[0129] The term “coding sequence” or “protein coding sequence” as used interchangeably herein refers to a segment of a polynucleotide that codes for a protein. Coding sequences can also be referred to as open reading frames. The region or sequence is bounded nearer the 5′ end by a start codon and nearer the 3′ end with a stop codon. Stop codons useful with the base editors described herein include the following:
[0130] Glutamine CAG→TAG Stop codon
   [0131] CAA→TAA
[0132] Arginine CGA→TGA
[0133] Tryptophan TGG→TGA
   [0134] TGG→TAG
   [0135] TGG→TAA

[0136] By “cytidine deaminase” is meant a polypeptide or fragment thereof capable of catalyzing a deamination reaction that converts an amino group to a carbonyl group. In one embodiment, the cytidine deaminase converts cytosine to uracil or 5-methylcytosine to thymine. PmCDA1 (SEQ ID NO: 41-42), which is derived from Petromyzon marinus (Petromyzon marinus cytosine deaminase 1, “PmCDA1”), AID (Activation-induced cytidine deaminase; AICDA) (Exemplary AID polypeptide sequences are provided in the Sequence Listing as SEQ ID NOs: 43-44, 1372, and 1374-1377), which is derived from a mammal (e.g., human, swine, bovine, horse, monkey etc.), and APOBEC are exemplary cytidine deaminases (Exemplary APOBEC polypeptide sequences are provided in the Sequence Listing as SEQ ID NOs: 1378-1416, 1421, and 1422. Further exemplary cytidine deaminase (CDA) sequences are provided in the Sequence Listing as SEQ ID NOs: 1373, 1417-1420. Additional exemplary cytidine deaminase sequences, including APOBEC polypeptide sequences, are provided in the Sequence Listing as SEQ ID NOs: 1378-1422.

[0137] The term “deaminase” or “deaminase domain,” as used herein, refers to a protein or enzyme that catalyzes a deamination reaction.

[0138] “Detect” refers to identifying the presence, absence or amount of the analyte to be detected. In one embodiment, a sequence alteration in a polynucleotide or polypeptide is detected. In another embodiment, the presence of indels is detected.

[0139] By “detectable label” is meant a composition that when linked to a molecule of interest renders the latter detectable, via spectroscopic, photochemical, biochemical, immunochemical, or chemical means. For example, useful labels include radioactive isotopes, magnetic beads, metallic beads, colloidal particles, fluorescent dyes, electron-dense reagents, enzymes (for example, as commonly used in an enzyme linked immunosorbent assay (ELISA)), biotin, digoxigenin, or haptens.

[0140] By “disease” is meant any condition or disorder that damages or interferes with the normal function of a cell, tissue, or organ. Exemplary diseases include neurological diseases and ophthalmic diseases.

[0141] By “effective amount” is meant the amount of an agent or active compound, e.g., a base editor as described herein, that is required to ameliorate the symptoms of a disease relative to an untreated patient or an individual without disease, i.e., a healthy individual, or is the amount of the agent or active compound sufficient to elicit a desired biological response. The effective amount of active compound(s) used to practice the present invention for therapeutic treatment of a disease varies depending upon the manner of administration, the age, body weight, and general health of the subject. Ultimately, the attending physician or veterinarian will decide the appropriate amount and dosage regimen. Such amount is referred to as an “effective” amount. In one embodiment, an effective amount is the amount of a base editor of the invention sufficient to introduce an alteration in a gene of interest in a cell (e.g., a cell in vitro or in vivo). In one embodiment, an effective amount is the amount of a base editor required to achieve a therapeutic effect. Such therapeutic effect need not be sufficient to alter a pathogenic gene in all cells of a subject, tissue or organ, but only to alter the pathogenic gene in about 1%, 5%, 10%, 25%, 50%, 75% or more of the cells present in a subject, tissue or organ. In one embodiment, an effective amount is sufficient to ameliorate one or more symptoms of a disease.

[0142] The term “exonuclease” refers to a protein or polypeptide capable of digesting a nucleic acid (e.g., RNA or DNA) from free ends.

[0143] The term “endonuclease” refers to a protein or polypeptide capable of catalyzing (e.g., cleaving) internal regions in a nucleic acid (e.g., DNA or RNA).

[0144] By “fragment” is meant a portion of a polypeptide or nucleic acid molecule. This portion contains, at least about 10%, 20%, 30%, 40%, 50%, 60%, 70%, 80%, or 90% of the entire length of the reference nucleic acid molecule or polypeptide. A fragment may contain 10, 20, 30, 40, 50, 60, 70, 80, 90, or 100, 200, 300, 400, 500, 600, 700, 800, 900, or 1000 nucleotides or amino acids.

[0145] By “guide RNA” or “gRNA” is meant a polynucleotide or polynucleotide complex which is specific for a target sequence and can form a complex with a polynucleotide programmable nucleotide binding domain protein (e.g., Cas9 or Cpf1). In an embodiment, the guide polynucleotide is a guide RNA (gRNA). gRNAs can exist as a complex of two or more RNAs, or as a single RNA molecule.

[0146] By “tRNA” or “transfer RNA” is meant a polynucleotide comprised of RNA nucleotides which serves as an adaptor molecule to serve as a physical link between mRNA and the amino acid sequence of the protein encoded by said mRNA. A “tRNA” or “transfer RNA” also refers to an RNA molecule comprising a secondary structure that can serve as a substrate for cellular RNases involved in tRNA maturation, such as RNAse P or RNase Z. The tRNA often comprises a cloverleaf structure that may include an acceptor stem region, and at least one of several loops, including the TψC loop, the variable loop, the anticodon loop, and the D-loop. The term “tRNA-like structure” is encompassed by the term tRNA as well and includes tRNA variants, tRNA fragments, viral tRNAs, and mascRNAs. The tRNA maturation process includes recognition of the tRNA structure and cleavage. Cleavage may occur, for example, though an RNase, such as RNase P or RNase Z. Accordingly, a tRNA or tRNA-like structure positioned at one or both of the 5′ end of a gRNA or the 3′ end of the gRNA will release said gRNA upon cleavage of said tRNA. In the context of a negative-strand genome, the tRNA or tRNA-like structure is positioned at one or both of the 3′ end of a gRNA or the 5′ end of the gRNA.

[0147] “Hybridization” means hydrogen bonding, which may be Watson-Crick, Hoogsteen or reversed Hoogsteen hydrogen bonding, between complementary nucleobases. For example, adenine and thymine are complementary nucleobases that pair through the formation of hydrogen bonds.

[0148] By “increases” is meant a positive alteration of at least 10%, 25%, 50%, 75%, or 100%.

[0149] The terms “inhibitor of base repair”, “base repair inhibitor”, “IBR” or their grammatical equivalents refer to a protein that is capable in inhibiting the activity of a nucleic acid repair enzyme, for example a base excision repair enzyme.

[0150] The terms “isolated,” “purified,” or “biologically pure” refer to material that is free to varying degrees from components which normally accompany it as found in its native state. “Isolate” denotes a degree of separation from original source or surroundings. “Purify” denotes a degree of separation that is higher than isolation. A “purified” or “biologically pure” protein is sufficiently free of other materials such that any impurities do not materially affect the biological properties of the protein or cause other adverse consequences. That is, a nucleic acid or peptide of this invention is purified if it is substantially free of cellular material, viral material, or culture medium when produced by recombinant DNA techniques, or chemical precursors or other chemicals when chemically synthesized. Purity and homogeneity are typically determined using analytical chemistry techniques, for example, polyacrylamide gel electrophoresis or high performance liquid chromatography. The term “purified” can denote that a nucleic acid or protein gives rise to essentially one band in an electrophoretic gel. For a protein that can be subjected to modifications, for example, phosphorylation or glycosylation, different modifications may give rise to different isolated proteins, which can be separately purified.

[0151] By “isolated polynucleotide” is meant a nucleic acid (e.g., a DNA) that is free of the genes which, in the naturally-occurring genome of the organism from which the nucleic acid molecule of the invention is derived, flank the gene. The term therefore includes, for example, a recombinant DNA that is incorporated into a vector; into an autonomously replicating plasmid or virus; or into the genomic DNA of a prokaryote or eukaryote; or that exists as a separate molecule (for example, a cDNA or a genomic or cDNA fragment produced by PCR or restriction endonuclease digestion) independent of other sequences. In addition, the term includes an RNA molecule that is transcribed from a DNA molecule, as well as a recombinant DNA that is part of a hybrid gene encoding additional polypeptide sequence.

[0152] By an “isolated polypeptide” is meant a polypeptide of the invention that has been separated from components that naturally accompany it. Typically, the polypeptide is isolated when it is at least 60%, by weight, free from the proteins and naturally-occurring organic molecules with which it is naturally associated. Preferably, the preparation is at least 75%, more preferably at least 90%, and most preferably at least 99%, by weight, a polypeptide of the invention. An isolated polypeptide of the invention may be obtained, for example, by extraction from a natural source, by expression of a recombinant nucleic acid encoding such a polypeptide; or by chemically synthesizing the protein. Purity can be measured by any appropriate method, for example, column chromatography, polyacrylamide gel electrophoresis, or by HPLC analysis.

[0153] The term “mutation,” as used herein, refers to a substitution of a residue within a sequence, e.g., a nucleic acid or amino acid sequence, with another residue, or a deletion or insertion of one or more residues within a sequence. Mutations are typically described herein by identifying the original residue followed by the position of the residue within the sequence and by the identity of the newly substituted residue. Various methods for making the amino acid substitutions (mutations) provided herein are well known in the art, and are provided by, for example, Green and Sambrook, Molecular Cloning: A Laboratory Manual (4^{th} ed., Cold Spring Harbor Laboratory Press, Cold Spring Harbor, N.Y. (2012)).

[0154] The terms “nucleic acid” and “nucleic acid molecule,” as used herein, refer to a compound comprising a nucleobase and an acidic moiety, e.g., a nucleoside, a nucleotide, or a polymer of nucleotides. Typically, polymeric nucleic acids, e.g., nucleic acid molecules comprising three or more nucleotides are linear molecules, in which adjacent nucleotides are linked to each other via a phosphodiester linkage. In some embodiments, “nucleic acid” refers to individual nucleic acid residues (e.g. nucleotides and/or nucleosides). In some embodiments, “nucleic acid” refers to an oligonucleotide chain comprising three or more individual nucleotide residues. As used herein, the terms “oligonucleotide” and “polynucleotide” can be used interchangeably to refer to a polymer of nucleotides (e.g., a string of at least three nucleotides). In some embodiments, “nucleic acid” encompasses RNA as well as single and/or double-stranded DNA. Nucleic acids may be naturally occurring, for example, in the context of a genome, a transcript, an mRNA, tRNA, rRNA, siRNA, snRNA, a plasmid, cosmid, chromosome, chromatid, or other naturally occurring nucleic acid molecule. On the other hand, a nucleic acid molecule may be a non-naturally occurring molecule, e.g., a recombinant DNA or RNA, an artificial chromosome, an engineered genome, or fragment thereof, or a synthetic DNA, RNA, DNA/RNA hybrid, or including non-naturally occurring nucleotides or nucleosides. Furthermore, the terms “nucleic acid,” “DNA,” “RNA,” and/or similar terms include nucleic acid analogs, e.g., analogs having other than a phosphodiester backbone. Nucleic acids can be purified from natural sources, produced using recombinant expression systems and optionally purified, chemically synthesized, etc. Where appropriate, e.g., in the case of chemically synthesized molecules, nucleic acids can comprise nucleoside analogs such as analogs having chemically modified bases or sugars, and backbone modifications. A nucleic acid sequence is presented in the 5′ to 3′ direction unless otherwise indicated. In some embodiments, a nucleic acid is or comprises natural nucleosides (e.g. adenosine, thymidine, guanosine, cytidine, uridine, deoxyadenosine, deoxythymidine, deoxyguanosine, and deoxycytidine); nucleoside analogs (e.g., 2-aminoadenosine, 2-thiothymidine, inosine, pyrrolo-pyrimidine, 3-methyl adenosine, 5-methylcytidine, 2-aminoadenosine, C5-bromouridine, C5-fluorouridine, C5-iodouridine, C5-propynyl-uridine, C5-propynyl-cytidine, C5-methylcytidine, 2-aminoadenosine, 7-deazaadenosine, 7-deazaguanosine, 8-oxoadenosine, 8-oxoguanosine, 0(6)-methylguanine, and 2-thiocytidine); chemically modified bases; biologically modified bases (e.g., methylated bases); intercalated bases; modified sugars (2′—e.g., fluororibose, ribose, 2′-deoxyribose, arabinose, and hexose); and/or modified phosphate groups (e.g., phosphorothioates and 5′-N-phosphoramidite linkages).

[0155] The term “nuclear localization sequence,” “nuclear localization signal,” or “NLS” refers to an amino acid sequence that promotes import of a protein into the cell nucleus. Nuclear localization sequences are known in the art and described, for example, in Plank et al., International PCT application, PCT/EP2000/011690, filed Nov. 23, 2000, published as WO/2001/038547 on May 31, 2001, the contents of which are incorporated herein by reference for their disclosure of exemplary nuclear localization sequences. In other embodiments, the NLS is an optimized NLS described, for example, by Koblan et al., Nature Biotech. 2018 doi:10.1038/nbt.4172. In some embodiments, an NLS comprises the amino acid sequence KRTADGSEFESPKKKRKV (SEQ ID NO: 84), KRPAATKKAGQAKKKK (SEQ ID NO: 85), KKTELQTTNAENKTKKL (SEQ ID NO: 86), KRGINDRNFWRGENGRKTR (SEQ ID NO: 87), RKSGKIAAIWKRPRK (SEQ ID NO: 88), PKKKRKV (SEQ ID NO: 89), or MDSLLMNRRKFLYQFKNVRWAKGRRETYLC (SEQ ID NO: 90).

[0156] The term “nucleobase,” “nitrogenous base,” or “base,” used interchangeably herein, refers to a nitrogen-containing biological compound that forms a nucleoside, which in turn is a component of a nucleotide. The ability of nucleobases to form base pairs and to stack one upon another leads directly to long-chain helical structures such as ribonucleic acid (RNA) and deoxyribonucleic acid (DNA). Five nucleobases—adenine (A), cytosine (C), guanine (G), thymine (T), and uracil (U)—are called primary or canonical. Adenine and guanine are derived from purine, and cytosine, uracil, and thymine are derived from pyrimidine. DNA and RNA can also contain other (non-primary) bases that are modified. Non-limiting exemplary modified nucleobases can include hypoxanthine, xanthine, 7-methylguanine, 5,6-dihydrouracil, 5-methylcytosine (m5C), and 5-hydromethylcytosine. Hypoxanthine and xanthine can be created through mutagen presence, both of them through deamination (replacement of the amine group with a carbonyl group). Hypoxanthine can be modified from adenine. Xanthine can be modified from guanine. Uracil can result from deamination of cytosine. A “nucleoside” consists of a nucleobase and a five carbon sugar (either ribose or deoxyribose). Examples of a nucleoside include adenosine, guanosine, uridine, cytidine, 5-methyluridine (m5U), deoxyadenosine, deoxyguanosine, thymidine, deoxyuridine, and deoxycytidine. Examples of a nucleoside with a modified nucleobase includes inosine (I), xanthosine (Ψ), 7-methylguanosine (m7G), dihydrouridine (D), 5-methylcytidine (m5C), and pseudouridine (1P). A “nucleotide” consists of a nucleobase, a five carbon sugar (either ribose or deoxyribose), and at least one phosphate group.

[0157] The terms “nucleic acid” and “nucleic acid molecule,” as used herein, refer to a compound comprising a nucleobase and an acidic moiety, e.g., a nucleoside, a nucleotide, or a polymer of nucleotides.

[0158] As used herein, the terms “oligonucleotide” and “polynucleotide” can be used interchangeably to refer to a polymer of nucleotides.

[0159] The term “nucleic acid programmable DNA binding protein” or “napDNAbp” may be used interchangeably with “polynucleotide programmable nucleotide binding domain” to refer to a protein that associates with a nucleic acid (e.g., DNA or RNA), such as a guide nucleic acid or guide polynucleotide (e.g., gRNA), that guides the napDNAbp to a specific nucleic acid sequence. In some embodiments, the polynucleotide programmable nucleotide binding domain is a polynucleotide programmable DNA binding domain. In some embodiments, the polynucleotide programmable nucleotide binding domain is a polynucleotide programmable RNA binding domain. In some embodiments, the polynucleotide programmable nucleotide binding domain is a Cas9 protein. A Cas9 protein can associate with a guide RNA that guides the Cas9 protein to a specific DNA sequence that is complementary to the guide RNA. In some embodiments, the napDNAbp is a Cas9 domain, for example a nuclease active Cas9, a Cas9 nickase (nCas9), or a nuclease inactive Cas9 (dCas9). Non-limiting examples of nucleic acid programmable DNA binding proteins include, Cas9 (e.g., dCas9 and nCas9), Cas12a/Cpfl, Cas12b/C2cl, Cas12c/C2c3, Cas12d/CasY, Cas12e/CasX, Cas12g, Cas12h, Cas12i, and Cas12j/Casϕ (Cas12j/Casphi). Non-limiting examples of Cas enzymes include Cas1, Cas1B, Cas2, Cas3, Cas4, Cas5, Cas5d, Cas5t, Cas5h, Cas5a, Cas6, Cas7, Cas8, Cas8a, Cas8b, Cas8c, Cas9 (also known as Csn1 or Csx12), Cas10, Cas10d, Cas12a/Cpfl, Cas12b/C2cl, Cas12c/C2c3, Cas12d/CasY, Cas12e/CasX, Cas12g, Cas12h, Cas12i, Cas12j/Casϕ, Cpf1, Csy1, Csy2, Csy3, Csy4, Cse1, Cse2, Cse3, Cse4, Cse5e, Csc1, Csc2, Csa5, Csn1, Csn2, Csm1, Csm2, Csm3, Csm4, Csm5, Csm6, Cmr1, Cmr3, Cmr4, Cmr5, Cmr6, Csb1, Csb2, Csb3, Csx17, Csx14, Csx10, Csx16, CsaX, Csx3, Csx1, Csx1S, Csx11, Csf1, Csf2, CsO, Csf4, Csd1, Csd2, Cst1, Cst2, Csh1, Csh2, Csa1, Csa2, Csa3, Csa4, Csa5, Type II Cas effector proteins, Type V Cas effector proteins, Type VI Cas effector proteins, CARF, DinG, homologues thereof, or modified or engineered versions thereof. Other nucleic acid programmable DNA binding proteins are also within the scope of this disclosure, although they may not be specifically listed in this disclosure. See, e.g., Makarova et al. “Classification and Nomenclature of CRISPR-Cas Systems: Where from Here?” CRISPR J. 2018 October; 1:325-336. doi: 10.1089/crispr.2018.0033; Yan et al., “Functionally diverse type V CRISPR-Cas systems” Science. 2019 Jan. 4; 363(6422):88-91. doi: 10.1126/science.aav7271, the entire contents of each are hereby incorporated by reference. Exemplary nucleic acid programmable DNA binding proteins and nucleic acid sequences encoding nucleic acid programmable DNA binding proteins are provided in the Sequence Listing as SEQ ID NOs: 223, 230-232, 235-242, 246-256, and 285-294.

[0160] The terms “nucleobase editing domain” or “nucleobase editing protein,” as used herein, refers to a protein or enzyme that can catalyze a nucleobase modification in RNA or DNA, such as cytosine (or cytidine) to uracil (or uridine) or thymine (or thymidine), and adenine (or adenosine) to hypoxanthine (or inosine) deaminations, as well as non-templated nucleotide additions and insertions. In some embodiments, the nucleobase editing domain is a deaminase domain (e.g., an adenine deaminase or an adenosine deaminase; or a cytidine deaminase or a cytosine deaminase).

[0161] As used herein, “obtaining” as in “obtaining an agent” includes synthesizing, purchasing, or otherwise acquiring the agent.

[0162] A “patient” or “subject” as used herein refers to a mammalian subject or individual diagnosed with, at risk of having or developing, or suspected of having or developing a disease or a disorder. In some embodiments, the term “patient” refers to a mammalian subject with a higher than average likelihood of developing a disease or a disorder. Exemplary patients can be humans, non-human primates, cats, dogs, pigs, cattle, cats, horses, camels, llamas, goats, sheep, rodents (e.g., mice, rabbits, rats, or guinea pigs) and other mammalians that can benefit from the therapies disclosed herein. Exemplary human patients can be male and/or female.

[0163] “Patient in need thereof” or “subject in need thereof” is referred to herein as a patient diagnosed with, at risk or having, predetermined to have, or suspected of having a disease or disorder.

[0164] The terms “pathogenic mutation”, “pathogenic variant”, “disease casing mutation”, “disease causing variant”, “deleterious mutation”, or “predisposing mutation” refers to a genetic alteration or mutation that increases an individual's susceptibility or predisposition to a certain disease or disorder. In some embodiments, the pathogenic mutation comprises at least one wild-type amino acid substituted by at least one pathogenic amino acid in a protein encoded by a gene.

[0165] The terms “protein”, “peptide”, “polypeptide”, and their grammatical equivalents are used interchangeably herein, and refer to a polymer of amino acid residues linked together by peptide (amide) bonds. A protein, peptide, or polypeptide can be naturally occurring, recombinant, or synthetic, or any combination thereof.

[0166] The term “fusion protein” as used herein refers to a hybrid polypeptide which comprises protein domains from at least two different proteins.

[0167] The term “recombinant” as used herein in the context of proteins or nucleic acids refers to proteins or nucleic acids that do not occur in nature, but are the product of human engineering. For example, in some embodiments, a recombinant protein or nucleic acid molecule comprises an amino acid or nucleotide sequence that comprises at least one, at least two, at least three, at least four, at least five, at least six, or at least seven mutations as compared to any naturally occurring sequence.

[0168] By “reduces” is meant a negative alteration of at least 10%, 25%, 50%, 75%, or 100%.

[0169] A “reference sequence” is a defined sequence used as a basis for sequence comparison. A reference sequence may be a subset of or the entirety of a specified sequence; for example, a segment of a full-length cDNA or gene sequence, or the complete cDNA or gene sequence. For polypeptides, the length of the reference polypeptide sequence will generally be at least about 16 amino acids, at least about 20 amino acids, at least about 25 amino acids, about 35 amino acids, about 50 amino acids, or about 100 amino acids. For nucleic acids, the length of the reference nucleic acid sequence will generally be at least about 50 nucleotides, at least about 60 nucleotides, at least about 75 nucleotides, about 100 nucleotides or about 300 nucleotides or any integer thereabout or therebetween. In some embodiments, a reference sequence is a wild-type sequence of a protein of interest. In other embodiments, a reference sequence is a polynucleotide sequence encoding a wild-type protein.

[0170] The term “RNA-programmable nuclease,” and “RNA-guided nuclease” are used with (e.g., binds or associates with) one or more RNA(s) that is not a target for cleavage. In some embodiments, an RNA-programmable nuclease, when in a complex with an RNA, may be referred to as a nuclease:RNA complex. Typically, the bound RNA(s) is referred to as a guide RNA (gRNA). In some embodiments, the RNA-programmable nuclease is the (CRISPR-associated system) Cas9 endonuclease, for example, Cas9 (Csnl) from Streptococcus pyogenes.

[0171] The term “single nucleotide polymorphism (SNP)” is a variation in a single nucleotide that occurs at a specific position in the genome, where each variation is present to some appreciable degree within a population (e.g., >1%).

[0172] By “specifically binds” is meant a nucleic acid molecule, polypeptide, polypeptide/polynucleotide complex, compound, or molecule that recognizes and binds a polypeptide and/or nucleic acid molecule of the invention, but which does not substantially recognize and bind other molecules in a sample, for example, a biological sample.

[0173] By “substantially identical” is meant a polypeptide or nucleic acid molecule exhibiting at least 50% identity to a reference amino acid sequence. In one embodiment, a reference sequence is a wild-type amino acid or nucleic acid sequence. In another embodiment, a reference sequence is any one of the amino acid or nucleic acid sequences described herein. In one embodiment, such a sequence is at least 60%, 80%, 85%, 90%, 95% or even 99% identical at the amino acid level or nucleic acid level to the sequence used for comparison.

[0174] Sequence identity is typically measured using sequence analysis software (for example, Sequence Analysis Software Package of the Genetics Computer Group, University of Wisconsin Biotechnology Center, 1710 University Avenue, Madison, Wis. 53705, BLAST, BESTFIT, GAP, or PILEUP/PRETTYBOX programs). Such software matches identical or similar sequences by assigning degrees of homology to various substitutions, deletions, and/or other modifications. Conservative substitutions typically include substitutions within the following groups: glycine, alanine; valine, isoleucine, leucine; aspartic acid, glutamic acid, asparagine, glutamine; serine, threonine; lysine, arginine; and phenylalanine, tyrosine. In an exemplary approach to determining the degree of identity, a BLAST program may be used, with a probability score between e⁻³ and e⁻¹⁰⁰ indicating a closely related sequence.

[0175] COBALT is used, for example, with the following parameters:
[0176] a) alignment parameters: Gap penalties-11,-1 and End-Gap penalties-5,-1,
[0177] b) CDD Parameters: Use RPS BLAST on; Blast E-value 0.003; Find Conserved columns and Recompute on, and
[0178] c) Query Clustering Parameters: Use query clusters on; Word Size 4; Max cluster distance 0.8; Alphabet Regular.

[0179] EMBOSS Needle is used, for example, with the following parameters:
[0180] a) Matrix: BLOSUM62;
[0181] b) GAP OPEN: 10;
[0182] c) GAP EXTEND: 0.5;
[0183] d) OUTPUT FORMAT: pair;
[0184] e) END GAP PENALTY: false;
[0185] f) END GAP OPEN: 10; and
[0186] g) END GAP EXTEND: 0.5.

[0187] Nucleic acid molecules useful in the methods of the invention include any nucleic acid molecule that encodes a polypeptide of the invention or a fragment thereof. Such nucleic acid molecules need not be 100% identical with an endogenous nucleic acid sequence, but will typically exhibit substantial identity. Polynucleotides having “substantial identity” to an endogenous sequence are typically capable of hybridizing with at least one strand of a double-stranded nucleic acid molecule. Nucleic acid molecules useful in the methods of the invention include any nucleic acid molecule that encodes a polypeptide of the invention or a fragment thereof. Such nucleic acid molecules need not be 100% identical with an endogenous nucleic acid sequence, but will typically exhibit substantial identity. Polynucleotides having “substantial identity” to an endogenous sequence are typically capable of hybridizing with at least one strand of a double-stranded nucleic acid molecule. By “hybridize” is meant pair to form a double-stranded molecule between complementary polynucleotide sequences (e.g., a gene described herein), or portions thereof, under various conditions of stringency. (See, e.g., Wahl, G. M. and S. L. Berger (1987) Methods Enzymol. 152:399; Kimmel, A. R. (1987) Methods Enzymol. 152:507).

[0188] For example, stringent salt concentration will ordinarily be less than about 750 mM NaCl and 75 mM trisodium citrate, preferably less than about 500 mM NaCl and 50 mM trisodium citrate, and more preferably less than about 250 mM NaCl and 25 mM trisodium citrate. Low stringency hybridization can be obtained in the absence of organic solvent, e.g., formamide, while high stringency hybridization can be obtained in the presence of at least about 35% formamide, and more preferably at least about 50% formamide. Stringent temperature conditions will ordinarily include temperatures of at least about 30° C., more preferably of at least about 37° C., and most preferably of at least about 42° C. Varying additional parameters, such as hybridization time, the concentration of detergent, e.g., sodium dodecyl sulfate (SDS), and the inclusion or exclusion of carrier DNA, are well known to those skilled in the art. Various levels of stringency are accomplished by combining these various conditions as needed. In a preferred: embodiment, hybridization will occur at 30° C. in 750 mM NaCl, 75 mM trisodium citrate, and 1% SDS. In a more preferred embodiment, hybridization will occur at 37° C. in 500 mM NaCl, 50 mM trisodium citrate, 1% SDS, 35% formamide, and 100 μg/ml denatured salmon sperm DNA (ssDNA). In a most preferred embodiment, hybridization will occur at 42° C. in 250 mM NaCl, 25 mM trisodium citrate, 1% SDS, 50% formamide, and 200 μg/ml ssDNA. Useful variations on these conditions will be readily apparent to those skilled in the art.

[0189] For most applications, washing steps that follow hybridization will also vary in stringency. Wash stringency conditions can be defined by salt concentration and by temperature. As above, wash stringency can be increased by decreasing salt concentration or by increasing temperature. For example, stringent salt concentration for the wash steps will preferably be less than about 30 mM NaCl and 3 mM trisodium citrate, and most preferably less than about 15 mM NaCl and 1.5 mM trisodium citrate. Stringent temperature conditions for the wash steps will ordinarily include a temperature of at least about 25° C., more preferably of at least about 42° C., and even more preferably of at least about 68° C. In an embodiment, wash steps will occur at 25° C. in 30 mM NaCl, 3 mM trisodium citrate, and 0.1% SDS. In another embodiment, wash steps will occur at 42 C in 15 mM NaCl, 1.5 mM trisodium citrate, and 0.1% SDS. In a more preferred embodiment, wash steps will occur at 68° C. in 15 mM NaCl, 1.5 mM trisodium citrate, and 0.1% SDS. Additional variations on these conditions will be readily apparent to those skilled in the art. Hybridization techniques are well known to those skilled in the art and are described, for example, in Benton and Davis (Science 196:180, 1977); Grunstein and Hogness (Proc. Natl. Acad. Sci., USA 72:3961, 1975); Ausubel et al. (Current Protocols in Molecular Biology, Wiley Interscience, New York, 2001); Berger and Kimmel (Guide to Molecular Cloning Techniques, 1987, Academic Press, New York); and Sambrook et al., Molecular Cloning: A Laboratory Manual, Cold Spring Harbor Laboratory Press, New York.

[0190] By “split” is meant divided into two or more fragments.

[0191] A “split Cas9 protein” or “split Cas9” refers to a Cas9 protein that is provided as an N-terminal fragment and a C-terminal fragment encoded by two separate nucleotide sequences. The polypeptides corresponding to the N-terminal portion and the C-terminal portion of the Cas9 protein may be spliced to form a “reconstituted” Cas9 protein.

[0192] The term “target site” refers to a sequence within a nucleic acid molecule that is deaminated by a deaminase (e.g., cytidine or adenine deaminase) or a fusion protein comprising a deaminase (e.g., a dCas9-adenosine deaminase fusion protein or a base editor disclosed herein).

[0193] As used herein, the terms “treat,” treating,” “treatment,” and the like refer to reducing or ameliorating a disorder and/or symptoms associated therewith or obtaining a desired pharmacologic and/or physiologic effect. It will be appreciated that, although not precluded, treating a disorder or condition does not require that the disorder, condition or symptoms associated therewith be completely eliminated. In some embodiments, the effect is therapeutic, i.e., without limitation, the effect partially or completely reduces, diminishes, abrogates, abates, alleviates, decreases the intensity of, or cures a disease and/or adverse symptom attributable to the disease. In some embodiments, the effect is preventative, i.e., the effect protects or prevents an occurrence or reoccurrence of a disease or condition. To this end, the presently disclosed methods comprise administering a therapeutically effective amount of a compositions as described herein.

[0194] By “uracil glycosylase inhibitor” or “UGI” is meant an agent that inhibits the uracil-excision repair system. Base editors comprising a cytidine deaminase convert cytosine to uracil, which is then converted to thymine through DNA replication or repair. Including an inhibitor of uracil DNA glycosylase (UGI) in the base editor prevents base excision repair which changes the U back to a C. An exemplary UGI comprises an amino acid sequence as follows:

(SEQ ID NO: 106)
>spIP14739IUNGI_BPPB2 Uracil-DNA glycosylase
inhibitor
MTNLSDIIEKETGKQLVIQESILMLPEEVEEVIGNKPESDILVHTAYDES
TDENVMLLTSDAPEYKPWALVIQDSNGENKIKML

[0195] Ranges provided herein are understood to be shorthand for all of the values within the range. For example, a range of 1 to 50 is understood to include any number, combination of numbers, or sub-range from the group consisting 1, 2, 3, 4, 5, 6, 7, 8, 9, 10, 11, 12, 13, 14, 15, 16, 17, 18, 19, 20, 21, 22, 23, 24, 25, 26, 27, 28, 29, 30, 31, 32, 33, 34, 35, 36, 37, 38, 39, 40, 41, 42, 43, 44, 45, 46, 47, 48, 49, or 50.

[0196] The recitation of a listing of chemical groups in any definition of a variable herein includes definitions of that variable as any single group or combination of listed groups. The recitation of an embodiment for a variable or aspect herein includes that embodiment as any single embodiment or in combination with any other embodiments or portions thereof.

[0197] All terms are intended to be understood as they would be understood by a person skilled in the art. Unless defined otherwise, all technical and scientific terms used herein have the same meaning as commonly understood by one of ordinary skill in the art to which the disclosure pertains.

[0198] In this application, the use of the singular includes the plural unless specifically stated otherwise. It must be noted that, as used in the specification, the singular forms “a,” “an” and “the” include plural referents unless the context clearly dictates otherwise. In this application, the use of “or” means “and/or” unless stated otherwise. Furthermore, use of the term “including” as well as other forms, such as “include”, “includes,” and “included,” is not limiting.

[0199] As used in this specification and claim(s), the words “comprising” (and any form of comprising, such as “comprise” and “comprises”), “having” (and any form of having, such as “have” and “has”), “including” (and any form of including, such as “includes” and “include”) or “containing” (and any form of containing, such as “contains” and “contain”) are inclusive or open-ended and do not exclude additional, unrecited elements or method steps. It is contemplated that any embodiment discussed in this specification can be implemented with respect to any method or composition of the present disclosure, and vice versa. Furthermore, compositions of the present disclosure can be used to achieve methods of the present disclosure.

[0200] The term “about” or “approximately” means within an acceptable error range for the particular value as determined by one of ordinary skill in the art, which will depend in part on how the value is measured or determined, i.e., the limitations of the measurement system. For example, “about” can mean within 1 or more than 1 standard deviation, per the practice in the art. Alternatively, “about” can mean a range of up to 20%, up to 10%, up to 5%, or up to 1% of a given value. Alternatively, particularly with respect to biological systems or processes, the term can mean within an order of magnitude, e.g., within 5-fold, within 2-fold of a value. Where particular values are described in the application and claims, unless otherwise stated, the term “about” means within an acceptable error range for the particular value should be assumed.

[0201] Reference in the specification to “certain embodiments,” “some embodiments,” “an embodiment,” “one embodiment” or “other embodiments” means that a particular feature, structure, or characteristic described in connection with the embodiments is included in at least some embodiments, but not necessarily all embodiments, of the present disclosures.

### B. Recombinant Negative-Strand RNA Viruses

[0202] Provided herein are recombinant negative-strand RNA viruses (e.g., rabies viruses) that are useful for transducing a target cell and delivering a guide RNA (gRNA). In one aspect, a recombinant negative-strand RNA virus of the present disclosure comprises a negative-strand RNA virus glycoprotein and a recombinant negative-strand RNA virus genome. In certain embodiments, the recombinant negative-strand RNA virus genome comprises a nucleic acid encoding a gRNA (i.e., a first gRNA) that comprises a 5′ end and a 3′ end. In certain embodiments, the recombinant negative-strand RNA virus genome comprises a nucleic acid encoding a tRNA which is positioned at one or both of the 3′ end of the nucleic acid encoding the gRNA and the 5′ end of the nucleic acid encoding the gRNA.

[0203] In certain embodiments, the recombinant negative-strand RNA virus genome further comprises a nucleic acid encoding a therapeutic transgene. As such, recombinant negative-strand RNA viruses of the present disclosure can be employed in a method for transducing a target cell, wherein the recombinant negative-strand RNA virus comprises a negative-strand RNA virus glycoprotein and a recombinant negative-strand RNA virus genome comprising a nucleic acid encoding a gRNA, and optionally a transgene (e.g., a therapeutic transgene, such as a nucleobase editor). Upon transduction of the target cell, the gRNA comprised within the recombinant negative-strand RNA virus genome is expressed and a gRNA is produced.

[0204] As used herein, the term “negative-strand RNA virus” or “negative-sense single-stranded RNA virus” refers to the phylum of Negarnaviricota. The negative-strand RNA viruses comprise a genome that acts as a complementary strand from which a messenger RNA (mRNA) is synthesized by the viral enzyme RNA-dependent RNA polymerase (RdRp) (e.g., a polymerase encoded by the L gene of the rabies virus). During replication of the viral genome, RdRp synthesizes a positive-sense antigenome that it uses as a template to create genomic negative-sense RNA. Accordingly, it will be readily understood to those of skill in the art that expression elements when referenced from the negative-strand genome may be oriented from 3′ to 5′, rather than 5′ to 3′. With respect to a negative-strand genome, a nucleic acid encoding a tRNA-gRNA cassette of the disclosure would comprise, from 3′ to 5′, a first tRNA, a first gRNA, and optionally a second tRNA. An mRNA expressed from said tRNA-gRNA cassette would comprise, from 5′ to 3′, a first tRNA, a first gRNA, and optionally a second tRNA.

[0205] As used herein, the term “lyssavirus” refers to a genus of negative sense single stranded RNA viruses belonging to the rhabdoviridae family. Lyssavirus particles are enveloped viruses with a cylindrical morphology, about 75 nm wide and about 180 nm long. The structure includes a lipoprotein envelope composed of glycoprotein G surrounding a helical ribonucleoprotein core. The lyssavirus genome contains five genes that encode for proteins that promote transcription and replication of the genome and proteins that make up the structural components of the virus. The five genes are: the N gene encoding for a lyssavirus nucleoprotein; the P gene encoding for a lyssavirus phosphoprotein; the M gene encoding for a lyssavirus matrix protein; the G gene encoding for a lyssavirus envelope protein (also known as the glycoprotein); and the L gene encoding for a lyssavirus polymerase. Viral genome RNA and the nucleoprotein together form a ribonucleoprotein that functions as a template for replication and transcription by the lyssavirus polymerase (an RNA-dependent RNA polymerase). Exemplary lyssaviruses include, but are not limited to, rabies virus (RABV), mokola virus (MOKV), duvenhage virus (DUVV), lagos bat virus (LBV), and west caucasian bat virus (WCBV).

[0206] Also known as Rabies lyssavirus, Rabies virus is a negative sense single stranded RNA virus of the Lyssavirus genus of the Rhabdoviridae family. Rabies virus has a cylindrical morphology, and the structure includes a lipoprotein envelope composed of glycoprotein G surrounding a helical ribonucleoprotein core. The rabies virus genome contains five genes that encode for proteins that promote transcription and replication of the genome and proteins that make up the structural components of the virus. The five genes are: the N gene encoding for a rabies virus nucleoprotein; the P gene encoding for a rabies virus phosphoprotein; the M gene encoding for a rabies virus matrix protein; the G gene encoding for a rabies virus glycoprotein; and the L gene encoding for a rabies virus polymerase. Viral genome RNA and the nucleoprotein together form a ribonucleoprotein that functions as a template for replication and transcription by the rabies virus polymerase (an RNA-dependent RNA polymerase).

[0207] In certain embodiments, a recombinant rabies virus genome of the present disclosure has one or more rabies virus genes removed. For example, the N gene, the P gene, the M gene, the L gene, and/or the G gene may be absent from the recombinant rabies virus genome. In certain embodiments, the recombinant rabies virus genome lacks a G gene encoding for a rabies virus glycoprotein or a functional variant thereof. Recombinant rabies virus genomes that lack a G gene encoding for a rabies virus glycoprotein prevents the virus from being able to endogenously produce glycoprotein. Because the glycoprotein is only required for the final steps of the viral life cycle, this deletion prevents the virus from spreading beyond initially infected cells, but it does not prevent the virus from completing the entirety of its replication cycle up to that point. In certain embodiments, the recombinant rabies virus genome lacks an L gene encoding for a rabies virus polymerase or a functional variant thereof. The L gene product is required both for transcription of viral genes and for replication of the viral genome, and deletion of the L gene may result in less cytotoxicity of a target transduced cell. See, e.g., Chatterjee et al., Nat. Neurosci. (2018) 21(4): 638-646, the disclosure of which is herein incorporated by reference in its entirety. In certain embodiments, the recombinant rabies virus genome lacks a G gene encoding for a rabies virus glycoprotein or a functional variant thereof, and lacks an L gene encoding for a rabies virus polymerase or a functional variant thereof.

[0208] It is readily appreciated by those of ordinary skill in the art that a recombinant rabies virus genome that lacks a rabies virus gene, as described herein, refers to a rabies virus genome that lacks all or a portion of the rabies virus gene. For example, a recombinant rabies virus genome that lacks a G gene may lack all or a portion of the G gene, wherein the portion of the G gene is required for the function of the G gene product. In certain embodiments, lacking a portion of the G gene that is required for the function of the G gene product may result in the production of a truncated, non-functional glycoprotein. In certain embodiments, a recombinant rabies virus genome that lacks an L gene may lack all or a portion of the L gene, wherein the portion of the L gene is required for the function of the L gene product. In certain embodiments, lacking a portion of the L gene that is required for the function of the L gene product may result in the production of a truncated, non-functional RNA-dependent RNA polymerase.

[0209] In certain embodiments, a recombinant rabies virus genome of the present disclosure comprises a nucleic acid encoding a gRNA that comprises a 5′ end and a 3′ end. In certain embodiments, the recombinant rabies virus genome further comprises a nucleic acid encoding a transfer RNA (tRNA) positioned the 3′ end of the nucleic acid encoding the gRNA or the 5′ end of the nucleic acid encoding the gRNA.

[0210] In certain embodiments, a recombinant rabies virus genome of the present disclosure further comprises a nucleic acid encoding a transgene. In certain embodiments, the nucleic acid comprising a transgene replaces the one or more rabies virus genes that are removed, as described herein. For example, the nucleic acid comprising a transgene may replace all or a portion of a rabies virus gene. In certain embodiments, the nucleic acid comprising a transgene replaces all or a portion of a G gene, wherein the portion of the G gene is required for the function of the G gene product. In certain embodiments, the nucleic acid comprising a transgene replaces all or a portion of an L gene, wherein the portion of the L gene is required for the function of the L gene product. In certain embodiments, the nucleic acid comprising a transgene replaces all or a portion of an L gene, wherein the portion of the L gene is required for the function of the L gene product; and all or a portion of a G gene, wherein the portion of the G gene is required for the function of the G gene product.

[0211] In certain embodiments, a recombinant rabies virus genome of the present disclosure encodes a nucleic acid comprising a transgene, wherein the transgene replaces the one or more rabies virus genes that are removed, as described herein. In certain embodiments, the recombinant rabies virus genome comprises an N gene encoding for a rabies virus nucleoprotein or a functional variant thereof, a P gene encoding for a rabies virus phosphoprotein or a functional variant thereof, and/or an M gene encoding for a rabies virus matrix protein or a functional variant thereof.

[0212] Exemplary nucleic acid sequences of the N, P, M, L, and G genes, and the amino acid sequence of the gene products thereof are provided in Table 1.

TABLE 1
Exemplary sequences for N, P, M, L, and G

| SEQ ID | |
|---|---|
| NO: | Sequence |
| SEQ ID | atggatgccgacaagattgtattcaaagtcaataatcaggtggtctctttgaagcctgagattatcgtggatcaatatgagtac |
| NO: | aagtaccctgccatcaaagatttgaaaaagccctgtataaccctaggaaaggctcccgatttaaataaagcatacaagtca |
| 4001 | gttttgtcaggcatgagcgccgccaaacttaatcctgacgatgtatgttcctatttggcagcggcaatgcagttttttgagggga |
| N gene | catgtccggaagactggaccagctatggaattgtgattgcacgaaaaggagataagatcaccccaggttctctggtggaga |
| (nucleic | taaaacgtactgatgtagaagggaattgggctctgacaggaggcatggaactgacaagagaccccactgtccctgagcat |
| acid) | gcgtccttagtcggtcttctcttgagtctgtataggttgagcaaaatatccgggcaaaacactggtaactataagacaaacatt |
| | gcagacaggatagagcagatttttgagacagccccttttgttaaaatcgtggaacaccatactctaatgacaactcacaaaa |
| | tgtgtgctaattggagtactataccaaacttcagatttttggccggaacctatgacatgtttttctcccggattgagcatctatattc |
| | agcaatcagagtgggcacagttgtcactgcttatgaagactgttcaggactggtatcatttactgggttcataaaacaaatca |
| | atctcaccgctagagaggcaatactatatttcttccacaagaactttgaggaagagataagaagaatgtttgagccagggc |
| | aggagacagctgttcctcactcttatttcatccacttccgttcactaggcttgagtgggaaatctccttattcatcaaatgctgttgg |
| | tcacgtgttcaatctcattcactttgtaggatgctatatgggtcaagtcagatccctaaatgcaacggttattgctgcatgtgctcc |
| | tcatgaaatgtctgttctagggggctatctgggagaggaattcttcgggaaagggacatttgaaagaagattcttcagagatg |
| | agaaagaacttcaagaatacgaggcggctgaactgacaaagactgacgtagcactggcagatgatggaactgtcaactc |
| | tgacgacgaggactacttttcaggtgaaaccagaagtccggaggctgtttatactcgaatcatgatgaatggaggtcgacta |
| | aagagatctcacatacggagatatgtctcagtcagttccaatcatcaagcccgtccaaactcattcgccgagtttctaaacaa |
| | gacatattcgagtgactca |
| SEQ ID | MDADKIVFKVNNQVVSLKPEIIVDQYEYKYPAIKDLKKPCITLGKAPDLNKAYKSVLSGMS |
| NO: | AAKLNPDDVCSYLAAAMQFFEGTCPEDWTSYGIVIARKGDKITPGSLVEIKRTDVEGNW |
| 4002 | ALTGGMELTRDPTVPEHASLVGLLLSLYRLSKISGQNTGNYKTNIADRIEQIFETAPFVKI |
| N gene | VEHHTLMTTHKMCANWSTIPNFRFLAGTYDMFFSRIEHLYSAIRVGTVVTAYEDCSGLV |
| (amino | SFTGFIKQINLTAREAILYFFHKNFEEEIRRMFEPGQETAVPHSYFIHFRSLGLSGKSPYS |
| acid) | SNAVGHVFNLIHFVGCYMGQVRSLNATVIAACAPHEMSVLGGYLGEEFFGKGTFERRF |
| | FRDEKELQEYEAAELTKTDVALADDGTVNSDDEDYFSGETRSPEAVYTRIMMNGGRLK |
| | RSHIRRYVSVSSNHQARPNSFAEFLNKTYSSDS |
| SEQ ID | ctcgatcctggagaggtctatgatgaccctattgacccaatcgagttagaggctgaacccagaggaacccccattgtcccc |
| NO: | aacatcttgaggaactctgactacaatctcaactctcctttgatagaagatcctgctagactaatgttagaatggttaaaaaca |
| 4003 | gggaatagaccttatcggatgactctaacagacaattgctccaggtctttcagagttttgaaagattatttcaagaaggtagatt |
| L gene | tgggttctctcaaggtgggcggaatggctgcacagtcaatgatttctctctggttatatggtgcccactctgaatccaacagga |
| (nucleic | gccggagatgtataacagacttggcccatttctattccaagtcgtcccccatagagaagctgttgaatctcacgctaggaaat |
| acid) | agagggctgagaatccccccagagggagtgttaagttgccttgagagggttgattatgataatgcatttggaaggtatcttgc |
| | caacacgtattcctcttacttgttcttccatgtaatcaccttatacatgaacgccctagactgggatgaagaaaagaccatccta |
| | gcattatggaaagatttaacctcagtggacatcgggaaggacttggtaaagttcaaagaccaaatatggggactgctgatc |
| | gtgacaaaggactttgtttactcccaaagttccaattgtctttttgacagaaactacacacttatgctaaaagatcttttcttgtctc |
| | gctggggatcaagtcttgtctatgtgtggaaactccggctatgaagtcatcaaaatattggagccatatgtcgtgaatagtttag |
| | tccagagagcagaaaagtttaggcctctcattcattccttgggagactttcctgtatttataaaagacaaggtaagtcaacttga |
| | agagacgttcggtccctgtgcaagaaggttctttagggctctggatcaattcgacaacatacatgacttggtttttgtgtttggctg |
| | ttacaggcattgggggcacccatatatagattatcgaaagggtctgtcaaaactatatgatcaggttcaccttaaaaaaatga |
| | tagataagtcctaccaggagtgcttagcaagcgacctagccaggaggatccttagatggggttttgataagtactccaagtg |
| | gtatctggattcaagattcctagcccgagaccaccccttgactccttatatcaaaacccaaacatggccacccaaacatattg |
| | tagacttggtgggggatacatggcacaagctcccgatcacgcagatctttgagattcctgaatcaatggatccgtcagaaat |
| | attggatgacaaatcacattctttcaccagaacgagactagcttcttggctgtcagaaaaccgaggggggcctgttcctagc |
| | gaaaaagttattatcacggccctgtctaagccgcctgtcaatccccgagagtttctgaggtctatagacctcggaggattgcc |
| | agatgaagacttgataattggcctcaagccaaaggaacgggaattgaagattgaaggtcgattctttgctctaatgtcatgga |
| | atctaagattgtattttgtcatcactgaaaaactcttggccaactacatcttgccactttttgacgcgctgactatgacagacaac |
| | ctgaacaaggtgtttaaaaagctgatcgacagggtcaccgggcaagggcttttggactattcaagggtcacatatgcatttca |
| | cctggactatgaaaagtggaacaaccatcaaagattagagtcaacagaggatgtattttctgtcctagatcaagtgtttggatt |
| | gaagagagtgttttctagaacacacgagttttttcaaaaggcctggatctattattcagacagatcagacctcatcgggttacg |
| | ggaggatcaaatatactgcttagatgcgtccaacggcccaacctgttggaatggccaggatggcgggctagaaggcttac |
| | ggcagaagggctggagtctagtcagcttattgatgatagatagagaatctcaaatcaggaacacaagaaccaaaatacta |
| | gctcaaggagacaaccaggttttatgtccgacatacatgttgtcgccagggctatctcaagaggggctcctctatgaattgga |
| | gagaatatcaaggaatgcactttcgatatacagagccgtcgaggaaggggcatctaagctagggctgatcatcaagaaa |
| | gaagagaccatgtgtagttatgacttcctcatctatggaaaaacccctttgtttagaggtaacatattggtgcctgagtccaaaa |
| | gatgggccagagtctcttgcgtctctaatgaccaaatagtcaacctcgccaatataatgtcgacagtgtccaccaatgcgcta |
| | acagtggcacaacactctcaatctttgatcaaaccgatgagggattttctgctcatgtcagtacaggcagtctttcactacctgc |
| | tatttagcccaatcttaaagggaagagtttacaagattctgagcgctgaaggggagagctttctcctagccatgtcaaggata |
| | atctatctagatccttctttgggagggatatctggaatgtccctcggaagattccatatacgacagttctcagaccctgtctctga |
| | agggttatccttctggagagagatctggttaagctcccaagagtcctggattcacgcgttgtgtcaagaggctggaaaccca |
| | gatcttggagagagaacactcgagagcttcactcgccttctagaagatccgaccaccttaaatatcagaggaggggccag |
| | tcctaccattctactcaaggatgcaatcagaaaggctttatatgacgaggtggacaaggtggaaaattcagagtttcgagag |
| | gcaatcctgttgtccaagacccatagagataattttatactcttcttaatatctgttgagcctctgtttcctcgatttctcagtgagcta |
| | ttcagttcgtcttttttgggaatccccgagtcaatcattggattgatacaaaactcccgaacgataagaaggcagtttagaaag |
| | agtctctcaaaaactttagaagaatccttctacaactcagagatccacgggattagtcggatgacccagacacctcagagg |
| | gttgggggggtgtggccttgctcttcagagagggcagatctacttagggagatctcttggggaagaaaagtggtaggcacg |
| | acagttcctcacccttctgagatgttgggattacttcccaagtcctctatttcttgcacttgtggagcaacaggaggaggcaatc |
| | ctagagtttctgtatcagtactcccgtcctttgatcagtcatttttttcacgaggccccctaaagggatacttgggctcgtccacctc |
| | tatgtcgacccagctattccatgcatgggaaaaagtcactaatgttcatgtggtgaagagagctctatcgttaaaagaatctat |
| | aaactggttcattactagagattccaacttggctcaagctctaattaggaacattatgtctctgacaggccctgatttccctctag |
| | aggaggcccctgtcttcaaaaggacggggtcagccttgcataggttcaagtctgccagatacagcgaaggagggtattctt |
| | ctgtctgcccgaacctcctctctcatatttctgttagtacagacaccatgtctgatttgacccaagacgggaagaactacgattt |
| | catgttccagccattgatgctttatgcacagacatggacatcagagctggtacagagagacacaaggctaagagactctac |
| | gtttcattggcacctccgatgcaacaggtgtgtgagacccattgacgacgtgaccctggagacctctcagatcttcgagtttcc |
| | ggatgtgtcgaaaagaatatccagaatggtttctggggctgtgcctcacttccagaggcttcccgatatccgtctgagaccag |
| | gagattttgaatctctaagcggtagagaaaagtctcaccatatcggatcagctcaggggctcttatactcaatcttagtggcaa |
| | ttcacgactcaggatacaatgatggaaccatcttccctgtcaacatatacggcaaggtttcccctagagactatttgagaggg |
| | ctcgcaaggggagtattgataggatcctcgatttgcttcttgacaagaatgacaaatatcaatattaatagacctcttgaattgg |
| | tctcaggggtaatctcatatattctcctgaggctagataaccatccctccttgtacataatgctcagagaaccgtctcttagagg |
| | agagatattttctatccctcagaaaatccccgccgcttatccaaccactatgaaagaaggcaacagatcaatcttgtgttatct |
| | ccaacatgtgctacgctatgagcgagagataatcacggcgtctccagagaatgactggctatggatottttcagactttagaa |
| | gtgccaaaatgacgtacctatccctcattacttaccagtctcatcttctactccagagggttgagagaaacctatctaagagtat |
| | gagagataacctgcgacaattgagttctttgatgaggcaggtgctggggggcacggagaagataccttagagtcagacg |
| | acaacattcaacgactgctaaaagactctttacgaaggacaagatgggtggatcaagaggtgcgccatgcagctagaac |
| | catgactggagattacagccccaacaagaaggtgtcccgtaaggtaggatgttcagaatgggtctgctctgctcaacaggtt |
| | gcagtctctacctcagcaaacccggcccctgtctcggagcttgacataagggccctctctaagaggttccagaaccctttgat |
| | ctcgggcttgagagtggttcagtgggcaaccggtgctcattataagcttaagcctattctagatgatctcaatgttttcccatctct |
| | ctgccttgtagttggggacgggtcaggggggatatcaagggcagtcctcaacatgtttccagatgccaagcttgtgttcaaca |
| | gtcttttagaggtgaatgacctgatggcttccggaacacatccactgcctccttcagcaatcatgaggggaggaaatgatatc |
| | gtctccagagtgatagatcttgactcaatctgggaaaaaccgtccgacttgagaaacttggcaacctggaaatacttccagt |
| | cagtccaaaagcaggtcaacatgtcctatgacctcattatttgcgatgcagaagttactgacattgcatctatcaaccggatca |
| | ccctgttaatgtccgattttgcattgtctatagatggaccactctatttggtcttcaaaacttatgggactatgctagtaaatccaaa |
| | ctacaaggctattcaacacctgtcaagagcgttcccctcggtcacagggtttatcacccaagtaacttcgtctttttcatctgagc |
| | tctacctccgattctccaaacgagggaagtttttcagagatgctgagtacttgacctcttccacccttcgagaaatgagccttgt |
| | gttattcaattgtagcagccccaagagtgagatgcagagagctcgttccttgaactatcaggatcttgtgagaggatttcctga |
| | agaaatcatatcaaatccttacaatgagatgatcataactctgattgacagtgatgtagaatcttttctagtccacaagatggtt |
| | gatgatcttgagttacagaggggaactctgtctaaagtggctatcattatagccatcatgatagttttctccaacagagtcttcaa |
| | cgtttccaaacccctaactgacccctcgttctatccaccgtctgatcccaaaatcctgaggcacttcaacatatgttgcagtact |
| | atgatgtatctatctactgctttaggtgacgtccctagcttcgcaagacttcacgacctgtataacagacctataacttattacttc |
| | agaaagcaagtcattcgagggaacgtttatctatcttggagttggtccaacgacacctcagtgttcaaaagggtagcctgtaa |
| | ttctagcctgagtctgtcatctcactggatcaggttgatttacaagatagtgaagactaccagactcgttggcagcatcaagga |
| | tctatccagagaagtggaaagacaccttcataggtacaacaggtggatcaccctagaggatatcagatctagatcatccct |
| | actagactacagttgcctg |
| SEQ ID | LDPGEVYDDPIDPIELEAEPRGTPIVPNILRNSDYNLNSPLIEDPARLMLEWLKTGNRPYR |
| NO: | MTLTDNCSRSFRVLKDYFKKVDLGSLKVGGMAAQSMISLWLYGAHSESNRSRRCITDL |
| 4004 | AHFYSKSSPIEKLLNLTLGNRGLRIPPEGVLSCLERVDYDNAFGRYLANTYSSYLFFHVIT |
| L gene | LYMNALDWDEEKTILALWKDLTSVDIGKDLVKFKDQIWGLLIVTKDFVYSQSSNCLFDRN |
| (amino | YTLMLKDLFLSRFNSLMVLLSPPEPRYSDDLISQLCQLYIAGDQVLSMCGNSGYEVIKILE |
| acid) | PYVVNSLVQRAEKFRPLIHSLGDFPVFIKDKVSQLEETFGPCARRFFRALDQFDNIHDLV |
| | FVFGCYRHWGHPYIDYRKGLSKLYDQVHLKKMIDKSYQECLASDLARRILRWGFDKYS |
| | KWYLDSRFLARDHPLTPYIKTQTWPPKHIVDLVGDTWHKLPITQIFEIPESMDPSEILDDK |
| | SHSFTRTRLASWLSENRGGPVPSEKVIITALSKPPVNPREFLRSIDLGGLPDEDLIIGLKP |
| | KERELKIEGRFFALMSWNLRLYFVITEKLLANYILPLFDALTMTDNLNKVFKKLIDRVTGQ |
| | GLLDYSRVTYAFHLDYEKWNNHQRLESTEDVFSVLDQVFGLKRVFSRTHEFFQKAWIY |
| | YSDRSDLIGLREDQIYCLDASNGPTCWNGQDGGLEGLRQKGWSLVSLLMIDRESQIRN |
| | TRTKILAQGDNQVLCPTYMLSPGLSQEGLLYELERISRNALSIYRAVEEGASKLGLIIKKE |
| | ETMCSYDFLIYGKTPLFRGNILVPESKRWARVSCVSNDQIVNLANIMSTVSTNALTVAQH |
| | SQSLIKPMRDFLLMSVQAVFHYLLFSPILKGRVYKILSAEGESFLLAMSRIIYLDPSLGGIS |
| | GMSLGRFHIRQFSDPVSEGLSFWREIWLSSQESWIHALCQEAGNPDLGERTLESFTRL |
| | LEDPTTLNIRGGASPTILLKDAIRKALYDEVDKVENSEFREAILLSKTHRDNFILFLISVEPL |
| | FPRFLSELFSSSFLGIPESIIGLIQNSRTIRRQFRKSLSKTLEESFYNSEIHGISRMTQTPQ |
| | RVGGVWPCSSERADLLREISWGRKVVGTTVPHPSEMLGLLPKSSISCTCGATGGGNP |
| | RVSVSVLPSFDQSFFSRGPLKGYLGSSTSMSTQLFHAWEKVTNVHVVKRALSLKESIN |
| | WFITRDSNLAQALIRNIMSLTGPDFPLEEAPVFKRTGSALHRFKSARYSEGGYSSVCPN |
| | LLSHISVSTDTMSDLTQDGKNYDFMFQPLMLYAQTWTSELVQRDTRLRDSTFHWHLRC |
| | NRCVRPIDDVTLETSQIFEFPDVSKRISRMVSGAVPHFQRLPDIRLRPGDFESLSGREKS |
| | HHIGSAQGLLYSILVAIHDSGYNDGTIFPVNIYGKVSPRDYLRGLARGVLIGSSICFLTRM |
| | TNININRPLELVSGVISYILLRLDNHPSLYIMLREPSLRGEIFSIPQKIPAAYPTTMKEGNRS |
| | ILCYLQHVLRYEREIITASPENDWLWIFSDFRSAKMTYLSLITYQSHLLLQRVERNLSKSM |
| | RDNLRQLSSLMRQVLGGHGEDTLESDDNIQRLLKDSLRRTRWDQEVRHAARTMTGD |
| | YSPNKKVSRKVGCSEWCSAQQVAVSTSANPAPVSELDIRALSKRFQNPLISGLRVVQ |
| | WATGAHYKLKPILDDLNVFPSLCLVVGDGSGGISRAVLNMFPDAKLVFNSLLEVNDLMA |
| | SGTHPLPPSAIMRGGNDIVSRVIDLDSIWEKPSDLRNLATWKYFQSVQKQVNMSYDLIIC |
| | DAEVTDIASINRITLLMSDFALSIDGPLYLVFKTYGTMLVNPNYKAIQHLSRAFPSVTGFIT |
| | QVTSSFSSELYLRFSKRGKFFRDAEYLTSSTLREMSLVLFNCSSPKSEMQRARSLNYQ |
| | DLVRGFPEEIISNPYNEMIITLIDSDVESFLVHKMVDDLELQRGTLSKVAIIIAIMIVFSNRVF |
| | NVSKPLTDPSFYPPSDPKILRHFNICCSTMMYLSTALGDVPSFARLHDLYNRPITYYFRK |
| | QVIRGNVYLSWSWSNDTSVFKRVACNSSLSLSSHWIRLIYKIVKTTRLVGSIKDLSREVE |
| | RHLHRYNRWITLEDIRSRSSLLDYSCL |
| SEQ ID | ttctagaagcagagaggaatctttgtcctcttcggacctttgtgtctgaagagacatgtcagaccatagttgacatgctctcggg |
| NO: | ttcatgttgatacaccagactctgccctggatatgacactgttttgcaatcactcttatttgcaatccgacgaactcagtatcatca |
| 4005 | tcccaagtgatctcctgagagtattccaactcctccccttcaagagggcccctggaatcagcccactggaagataaaggttct |
| M gene | cctcaatttgtatacccagttcaggccctcagggactggagatcctgacaaagccagtccaataaccactttgactaacccg |
| (nucleic | atcatcctatgattcccagaatatatctcgtcgaatgatttcagaatgtgccgcaggatcctgaacgagtaaccattcgggcta |
| acid) | cacactttaacccttccgttgatacaaaagttcctcatgttcttcttgcctgtaagttctttcagcgggacgtattcagggggtgga |
| | agccacaagtcatcgtcatccagaggggctgacgcgggagaggatttttgagtgtcctcgtccctgcggtttttcactatcttac |
| | gtaggaggtt |
| SEQ ID | NLLRKIVKNRRDEDTQKSSPASAPLDDDDLWLPPPEYVPLKELTGKKNMRNFCINGRVK |
| NO: | VCSPNGYSFRILRHILKSFDEIYSGNHRMIGLVKVVIGLALSGSPVPEGLNWVYKLRRTFI |
| 4006 | FQWADSRGPLEGEELEYSQEITWDDDTEFVGLQIRVIAKQCHIQGRVWCINMNPRACQ |
| M gene | LWSDMSLQTQRSEEDKDSSLLLE |
| (amino | |
| acid) | |
| SEQ ID | agcaagatctttgtcaatcctagtgctattagagccggtctggccgatcttgagatggctgaagaaactgttgatctgatcaata |
| NO: | gaaatatcgaagacaatcaggctcatctccaaggggaacccatagaggtggacaatctccctgaggatatggggcgactt |
| 4007 | cacctggatgatggaaaatcgcccaaccatggtgagatagccaaggtgggagaaggcaagtatcgagaggactttcag |
| P gene | atggatgaaggagaggatcctagcttcctgttccagtcatacctggaaaatgttggagtccaaatagtcagacaaatgaggt |
| (nucleic | caggagagagatttctcaagatatggtcacagaccgtagaagagattatatcctatgtcgcggtcaactttcccaaccctcca |
| acid) | ggaaagtcttcagaggataaatcaacccagactactggccgagagctcaagaaggagacaacacccactccttctcaga |
| | gagaaagccaatcatcgaaagccaggatggcggctcaaattgcttctggccctccagcccttgaatggtcggctaccaatg |
| | aagaggatgatctatcagtggaggctgagatcgctcaccagattgcagaaagtttctccaaaaaatataagtttccctctcga |
| | tcctcagggatactcttgtataattttgagcaattgaaaatgaaccttgatgatatagttaaagaggcaaaaaatgtaccaggt |
| | gtgacccgtttagcccatgacgggtccaaactccccctaagatgtgtactgggatgggtcgctttggccaactctaagaaatt |
| | ccagttgttagtcgaatccgacaagctgagtaaaatcatgcaagatgacttgaatcgctatacatcttgc |
| SEQ ID | SKIFVNPSAIRAGLADLEMAEETVDLINRNIEDNQAHLQGEPIEVDNLPEDMGRLHLDDG |
| NO: | KSPNHGEIAKVGEGKYREDFQMDEGEDPSFLFQSYLENVGVQIVRQMRSGERFLKIWS |
| 4008 | QTVEEIISYVAVNFPNPPGKSSEDKSTQTTGRELKKETTPTPSQRESQSSKARMAAQIA |
| P gene | SGPPALEWSATNEEDDLSVEAEIAHQIAESFSKKYKFPSRSSGILLYNFEQLKMNLDDIV |
| (amino | KEAKNVPGVTRLAHDGSKLPLRCVLGWWVALANSKKFQLLVESDKLSKIMQDDLNRYTS |
| acid) | C |
| SEQ ID | atggttcctcaggctctcctgtttgtaccccttctggtttttccattgtgttttgggaaattccctatttacacgataccagacaagctt |
| NO: | ggtccctggagtccgattgacatacatcacctcagctgcccaaacaatttggtagtggaggacgaaggatgcaccaacctg |
| 4009 | tcagggttctcctacatggaacttaaagttggatacatcttagccataaaagtgaacgggttcacttgcacaggcgttgtgacg |
| G gene | gaggctgaaacctacactaacttcgttggttatgtcacaaccacgttcaaaagaaagcatttccgcccaacaccagatgcat |
| (nucleic | gtagagccgcgtacaactggaagatggccggtgaccccagatatgaagagtctctacacaatccgtaccctgactaccgc |
| acid) | tggcttcgaactgtaaaaaccaccaaggagtctctcgttatcatatctccaagtgtggcagatttggacccatatgacagatcc |
| | cttcactcgagggtcttccctagcgggaagtgctcaggagtagcggtgtcttctacctactgctccactaaccacgattacacc |
| | atttggatgcccgagaatccgagactagggatgtcttgtgacatttttaccaatagtagagggaagagagcatccaaaggg |
| | agtgagacttgoggctttgtagatgaaagaggcctatataagtctttaaaaggagcatgcaaactcaagttatgtggagttcta |
| | ggacttagacttatggatggaacatgggtctcgatgcaaacatcaaatgaaaccaaatggtgccctcccgataagttggtga |
| | acctgcacgactttcgctcagacgaaattgagcaccttgttgtagaggagttggtcaggaagagagaggagtgtctggatg |
| | cactagagtccatcatgacaaccaagtcagtgagtttcagacgtctcagtcatttaagaaaacttgtccctgggtttggaaaa |
| | gcatataccatattcaacaagaccttgatggaagccgatgctcactacaagtcagtcagaacttggaatgagatcctcccttc |
| | aaaagggtgtttaagagttggggggaggtgtcatcctcatgtgaacggggtgtttttcaatggtataatattaggacctgacgg |
| | caatgtcttaatcccagagatgcaatcatccctcctccagcaacatatggagttgttggaatcctcggttatcccccttgtgcac |
| | cccctggcagacccgtctaccgttttcaaggacggtgacgaggctgaggattttgttgaagttcaccttcccgatgtgcacaat |
| | caggtctcaggagttgacttgggtctcccgaactgggggaagtatgtattactgagtgcaggggccctgactgccttgatgttg |
| | ataattttcctgatgacatgttgtagaagagtcaatcgatcagaacctacgcaacacaatctcagagggacagggaggga |
| | ggtgtcagtcactccccaaagcgggaagatcatatcttcatgggaatcacacaagagtgggggtgagaccagactg |
| SEQ ID | MVPQALLFVPLLVFPLCFGKFPIYTIPDKLGPWSPIDIHHLSCPNNLVVEDEGCTNLSGFS |
| NO: | YMELKVGYILAIKVNGFTCTGVVTEAETYTNFVGYVTTTFKRKHFRPTPDACRAAYNWK |
| 4010 | MAGDPRYEESLHNPYPDYRWLRTVKTTKESLVIISPSVADLDPYDRSLHSRVFPSGKCS |
| G gene | GVAVSSTYCSTNHDYTIWMPENPRLGMSCDIFTNSRGKRASKGSETCGFVDERGLYKS |
| (amino | LKGACKLKLCGVLGLRLMDGTWVSMQTSNETKWCPPDKLVNLHDFRSDEIEHLVVEEL |
| acid) | VRKREECLDALESIMTTKSVSFRRLSHLRKLVPGFGKAYTIFNKTLMEADAHYKSVRTW |
| | NEILPSKGCLRVGGRCHPHVNGVFFNGIILGPDGNVLIPEMQSSLLQQHMELLESSVIPL |
| | VHPLADPSTVFKDGDEAEDFVEVHLPDVHNQVSGVDLGLPNWGKYVLLSAGALTALML |
| | IIFLMTCCRRVNRSEPTQHNLRGTGREVSVTPQSGKIISSWESHKSGGETRL |

[0213] In certain embodiments, the recombinant rabies virus genome comprises an N gene having a nucleic acid sequence that is about 60%, about 65%, about 70%, about 75%, about 80%, about 81%, about 82%, about 83%, about 84%, about 85%, about 86%, about 87%, about 88%, about 89%, about 90%, about 91%, about 92%, about 93%, about 94%, about 95%, about 96%, about 97%, about 98%, about 99% identical to the nucleic acid sequence set forth in SEQ ID NO: 4001. In certain embodiments, the recombinant rabies virus genome comprises an N gene having a nucleic acid sequence that is at least 60%, at least 65%, about 70%, at least 75%, at least 80%, at least 81%, at least 82%, at least 83%, at least 84%, at least 85%, at least 86%, at least 87%, at least 88%, at least 89%, at least 90%, at least 91%, at least 92%, at least 93%, at least 94%, at least 95%, at least 96%, at least 97%, at least 98%, at least 99% identical to the nucleic acid sequence set forth in SEQ ID NO: 4001. In certain embodiments, the recombinant rabies virus genome comprises an N gene comprising the nucleic acid sequence set forth in SEQ ID NO: 4001. In certain embodiments, the recombinant rabies virus genome comprises an N gene consisting of the nucleic acid sequence set forth in SEQ ID NO: 4001. In certain embodiments, the N gene encodes for an amino acid sequence that is about 80%, about 81%, about 82%, about 83%, about 84%, about 85%, about 86%, about 87%, about 88%, about 89%, about 90%, about 91%, about 92%, about 93%, about 94%, about 95%, about 96%, about 97%, about 98%, about 99% identical to the amino acid sequence set forth in SEQ ID NO: 4002. In certain embodiments, the N gene encodes for an amino acid sequence that is at least 80%, at least 81%, at least 82%, at least 83%, at least 84%, at least 85%, at least 86%, at least 87%, at least 88%, at least 89%, at least 90%, at least 91%, at least 92%, at least 93%, at least 94%, at least 95%, at least 96%, at least 97%, at least 98%, at least 99% identical to the amino acid sequence set forth in SEQ ID NO: 4002. In certain embodiments, the N gene encodes for an amino acid sequence comprising the amino acid sequence set forth in SEQ ID NO: 4002. In certain embodiments, the N gene encodes for an amino acid sequence consisting of the amino acid sequence set forth in SEQ ID NO: 4002.

[0214] In certain embodiments, the recombinant rabies virus genome comprises an L gene having a nucleic acid sequence that is about 60%, about 65%, about 70%, about 75%, about 80%, about 81%, about 82%, about 83%, about 84%, about 85%, about 86%, about 87%, about 88%, about 89%, about 90%, about 91%, about 92%, about 93%, about 94%, about 95%, about 96%, about 97%, about 98%, about 99% identical to the nucleic acid sequence set forth in SEQ ID NO: 4003. In certain embodiments, the recombinant rabies virus genome comprises an L gene having a nucleic acid sequence that is at least 60%, at least 65%, about 70%, at least 75%, at least 80%, at least 81%, at least 82%, at least 83%, at least 84%, at least 85%, at least 86%, at least 87%, at least 88%, at least 89%, at least 90%, at least 91%, at least 92%, at least 93%, at least 94%, at least 95%, at least 96%, at least 97%, at least 98%, at least 99% identical to the nucleic acid sequence set forth in SEQ ID NO: 4003. In certain embodiments, the recombinant rabies virus genome comprises an L gene comprising the nucleic acid sequence set forth in SEQ ID NO: 4003. In certain embodiments, the recombinant rabies virus genome comprises an L gene consisting of the nucleic acid sequence set forth in SEQ ID NO: 4003. In certain embodiments, the L gene encodes for an amino acid sequence that is about 80%, about 81%, about 82%, about 83%, about 84%, about 85%, about 86%, about 87%, about 88%, about 89%, about 90%, about 91%, about 92%, about 93%, about 94%, about 95%, about 96%, about 97%, about 98%, about 99% identical to the amino acid sequence set forth in SEQ ID NO: 4004. In certain embodiments, the L gene encodes for an amino acid sequence that is at least 80%, at least 81%, at least 82%, at least 83%, at least 84%, at least 85%, at least 86%, at least 87%, at least 88%, at least 89%, at least 90%, at least 91%, at least 92%, at least 93%, at least 94%, at least 95%, at least 96%, at least 97%, at least 98%, at least 99% identical to the amino acid sequence set forth in SEQ ID NO: 4004. In certain embodiments, the L gene encodes for an amino acid sequence comprising the amino acid sequence set forth in SEQ ID NO: 4004. In certain embodiments, the L gene encodes for an amino acid sequence consisting of the amino acid sequence set forth in SEQ ID NO: 4004.

[0215] In certain embodiments, the recombinant rabies virus genome comprises an M gene having a nucleic acid sequence that is about 60%, about 65%, about 70%, about 75%, about 80%, about 81%, about 82%, about 83%, about 84%, about 85%, about 86%, about 87%, about 88%, about 89%, about 90%, about 91%, about 92%, about 93%, about 94%, about 95%, about 96%, about 97%, about 98%, about 99% identical to the nucleic acid sequence set forth in SEQ ID NO: 4005. In certain embodiments, the recombinant rabies virus genome comprises an M gene having a nucleic acid sequence that is at least 60%, at least 65%, about 70%, at least 75%, at least 80%, at least 81%, at least 82%, at least 83%, at least 84%, at least 85%, at least 86%, at least 87%, at least 88%, at least 89%, at least 90%, at least 91%, at least 92%, at least 93%, at least 94%, at least 95%, at least 96%, at least 97%, at least 98%, at least 99% identical to the nucleic acid sequence set forth in SEQ ID NO: 4005. In certain embodiments, the recombinant rabies virus genome comprises an M gene comprising the nucleic acid sequence set forth in SEQ ID NO: 4005. In certain embodiments, the recombinant rabies virus genome comprises an M gene consisting of the nucleic acid sequence set forth in SEQ ID NO: 4005. In certain embodiments, the M gene encodes for an amino acid sequence that is about 80%, about 81%, about 82%, about 83%, about 84%, about 85%, about 86%, about 87%, about 88%, about 89%, about 90%, about 91%, about 92%, about 93%, about 94%, about 95%, about 96%, about 97%, about 98%, about 99% identical to the amino acid sequence set forth in SEQ ID NO: 4006. In certain embodiments, the M gene encodes for an amino acid sequence that is at least 80%, at least 81%, at least 82%, at least 83%, at least 84%, at least 85%, at least 86%, at least 87%, at least 88%, at least 89%, at least 90%, at least 91%, at least 92%, at least 93%, at least 94%, at least 95%, at least 96%, at least 97%, at least 98%, at least 99% identical to the amino acid sequence set forth in SEQ ID NO: 4006. In certain embodiments, the M gene encodes for an amino acid sequence comprising the amino acid sequence set forth in SEQ ID NO: 4006. In certain embodiments, the M gene encodes for an amino acid sequence consisting of the amino acid sequence set forth in SEQ ID NO: 4006.

[0216] In certain embodiments, the recombinant rabies virus genome comprises a P gene having a nucleic acid sequence that is about 60%, about 65%, about 70%, about 75%, about 80%, about 81%, about 82%, about 83%, about 84%, about 85%, about 86%, about 87%, about 88%, about 89%, about 90%, about 91%, about 92%, about 93%, about 94%, about 95%, about 96%, about 97%, about 98%, about 99% identical to the nucleic acid sequence set forth in SEQ ID NO: 4007. In certain embodiments, the recombinant rabies virus genome comprises a P gene having a nucleic acid sequence that is at least 60%, at least 65%, about 70%, at least 75%, at least 80%, at least 81%, at least 82%, at least 83%, at least 84%, at least 85%, at least 86%, at least 87%, at least 88%, at least 89%, at least 90%, at least 91%, at least 92%, at least 93%, at least 94%, at least 95%, at least 96%, at least 97%, at least 98%, at least 99% identical to the nucleic acid sequence set forth in SEQ ID NO: 4007. In certain embodiments, the recombinant rabies virus genome comprises a P gene comprising the nucleic acid sequence set forth in SEQ ID NO: 4007. In certain embodiments, the recombinant rabies virus genome comprises a P gene consisting of the nucleic acid sequence set forth in SEQ ID NO: 4007. In certain embodiments, the P gene encodes for an amino acid sequence that is about 80%, about 81%, about 82%, about 83%, about 84%, about 85%, about 86%, about 87%, about 88%, about 89%, about 90%, about 91%, about 92%, about 93%, about 94%, about 95%, about 96%, about 97%, about 98%, about 99% identical to the amino acid sequence set forth in SEQ ID NO: 4008. In certain embodiments, the P gene encodes for an amino acid sequence that is at least 80%, at least 81%, at least 82%, at least 83%, at least 84%, at least 85%, at least 86%, at least 87%, at least 88%, at least 89%, at least 90%, at least 91%, at least 92%, at least 93%, at least 94%, at least 95%, at least 96%, at least 97%, at least 98%, at least 99% identical to the amino acid sequence set forth in SEQ ID NO: 4008. In certain embodiments, the P gene encodes for an amino acid sequence comprising the amino acid sequence set forth in SEQ ID NO: 4008. In certain embodiments, the P gene encodes for an amino acid sequence consisting of the amino acid sequence set forth in SEQ ID NO: 4008.

[0217] In certain embodiments, the recombinant rabies virus genome comprises a G gene having a nucleic acid sequence that is about 60%, about 65%, about 70%, about 75%, about 80%, about 81%, about 82%, about 83%, about 84%, about 85%, about 86%, about 87%, about 88%, about 89%, about 90%, about 91%, about 92%, about 93%, about 94%, about 95%, about 96%, about 97%, about 98%, about 99% identical to the nucleic acid sequence set forth in SEQ ID NO: 4009. In certain embodiments, the recombinant rabies virus genome comprises a G gene having a nucleic acid sequence that is at least 60%, at least 65%, about 70%, at least 75%, at least 80%, at least 81%, at least 82%, at least 83%, at least 84%, at least 85%, at least 86%, at least 87%, at least 88%, at least 89%, at least 90%, at least 91%, at least 92%, at least 93%, at least 94%, at least 95%, at least 96%, at least 97%, at least 98%, at least 99% identical to the nucleic acid sequence set forth in SEQ ID NO: 4009. In certain embodiments, the recombinant rabies virus genome comprises a G gene comprising the nucleic acid sequence set forth in SEQ ID NO: 4009. In certain embodiments, the recombinant rabies virus genome comprises a G gene consisting of the nucleic acid sequence set forth in SEQ ID NO: 4009. In certain embodiments, the G gene encodes for an amino acid sequence that is about 80%, about 81%, about 82%, about 83%, about 84%, about 85%, about 86%, about 87%, about 88%, about 89%, about 90%, about 91%, about 92%, about 93%, about 94%, about 95%, about 96%, about 97%, about 98%, about 99% identical to the amino acid sequence set forth in SEQ ID NO: 4010. In certain embodiments, the G gene encodes for an amino acid sequence that is at least 80%, at least 81%, at least 82%, at least 83%, at least 84%, at least 85%, at least 86%, at least 87%, at least 88%, at least 89%, at least 90%, at least 91%, at least 92%, at least 93%, at least 94%, at least 95%, at least 96%, at least 97%, at least 98%, at least 99% identical to the amino acid sequence set forth in SEQ ID NO: 4010. In certain embodiments, the G gene encodes for an amino acid sequence comprising the amino acid sequence set forth in SEQ ID NO: 4010. In certain embodiments, the G gene encodes for an amino acid sequence consisting of the amino acid sequence set forth in SEQ ID NO: 4010.

[0218] Each of the genes comprised within a recombinant rabies virus genome of the present disclosure may be operably linked to a transcriptional regulatory element. In certain embodiments, wherein the genes are linked on a single expression cassette, a single transcriptional regulatory element may be capable of controlling the expression of the genes. In certain embodiments, each gene is operably linked to a separate transcriptional regulatory element. In certain embodiments, the transcriptional regulatory elements for each gene may be the same. In certain embodiments, the transcriptional regulatory elements for each gene may be different.

[0219] In certain embodiments, each of the genes are operably linked to a transcriptional regulatory element, wherein the transcriptional regulatory element is capable of controlling the expression of the gene that is operably linked thereto. In certain embodiments, the transcriptional regulatory element comprises a transcription initiation signal. The transcription initiation signal can be endogenous or exogenous to the rabies virus. In certain embodiments, the transcription initiation signal is a synthetic transcription initiation signal. In certain embodiments, the nucleic acid encoding a transgene is further operably linked to a transcription termination polyadenylation signal. The transcription termination polyadenylation signal can be endogenous or exogenous to the rabies virus. In certain embodiments, the transcription termination polyadenylation signal is a synthetic transcription termination polyadenylation signal. Examples of suitable transcription initiation signals and transcriptional termination polyadenylaton signals are known to those of ordinary skill in the art, and are described in, e.g., Albertini et al., Adv. Virus. Res. (2011) 79: 1-22; Ogino and Green, Viruses (2019) 11(6): 504; Ogino et al., Nucl. Acids. Res. (2019) 47(1): 299-309; and Ogino and Green, Front. Microbiol. (2019) 10: 1490, the disclosures of which are herein incorporated by reference in their entireties.

### C. Guide RNA & Recombinant Negative-Strand RNA Virus Genomes Encoding the Same

[0220] In one aspect, the disclosure provides a recombinant negative-strand RNA virus genome, comprising a nucleic acid encoding a first guide RNA (gRNA) that comprises a 5′ end and a 3′ end; and a nucleic acid encoding a first transfer RNA (tRNA) positioned at one of both of the 3′ end of the nucleic acid encoding the first gRNA or the 5′ end of the nucleic acid encoding the first gRNA.

[0221] In certain embodiments, the recombinant negative-strand RNA virus genome comprises a nucleic acid encoding a second tRNA. In certain embodiments, the recombinant negative-strand RNA virus genome comprises a nucleic acid encoding a third tRNA. In certain embodiments, the recombinant negative-strand RNA virus genome comprises a nucleic acid encoding a fourth tRNA. In certain embodiments, the recombinant negative-strand RNA virus genome comprises a nucleic acid encoding a fifth tRNA.

[0222] In certain embodiments, the nucleic acid encoding the first tRNA is positioned at the 3′ end of the nucleic acid encoding the first gRNA; and the nucleic acid encoding the second tRNA is positioned at the 5′ end of the nucleic acid encoding the first gRNA.

[0223] In certain embodiments, the nucleotide sequence of the first tRNA and the nucleotide sequence of the second tRNA, third tRNA, fourth tRNA, and/or fifth tRNA are at least 90%, 91%, 92%, 93%, 94%, 95%, 96%, 97%, 98%, 99%, or 100% identical.

[0224] In certain embodiments, the first tRNA and the second tRNA, third tRNA, fourth tRNA, and/or fifth tRNA specify the same amino acid. For example, the first tRNA and the second tRNA possess different anti-codon loop sequences, each anti-codon loop sequence corresponding to the same amino acid (e.g., a first tRNA with an anti-codon loop sequence comprising 5′ GGC 3′ specifying Ala, and a second tRNA with an anti-codon loop sequence comprising 5′ AGC 3′, also specifying Ala).

[0225] In certain embodiments, the first tRNA and the second tRNA, third tRNA, fourth tRNA, and/or fifth tRNA specify different amino acids. For example, the first tRNA and the second tRNA possess different anti-codon loop sequences, each anti-codon loop sequence corresponding to different amino acids (e.g., a first tRNA with an anti-codon loop sequence comprising 5′ GGC 3′ specifying Ala, and a second tRNA with an anti-codon loop sequence comprising 5′ AAA 3′, specifying Phe).

[0226] In certain embodiments, the recombinant negative-strand RNA virus genome comprises two or more nucleic acids encoding the first tRNA, second tRNA, third tRNA, fourth tRNA, and/or fifth tRNA. In certain embodiments, the recombinant negative-strand RNA virus genome comprises two nucleic acids encoding the first tRNA, second tRNA, third tRNA, fourth tRNA, and/or fifth tRNA. In certain embodiments, the recombinant negative-strand RNA virus genome comprises three nucleic acids encoding the first tRNA, second tRNA, third tRNA, fourth tRNA, and/or fifth tRNA. In certain embodiments, the recombinant negative-strand RNA virus genome comprises four nucleic acids encoding the first tRNA, second tRNA, third tRNA, fourth tRNA, and/or fifth tRNA. In certain embodiments, the recombinant negative-strand RNA virus genome comprises five nucleic acids encoding the first tRNA, second tRNA, third tRNA, fourth tRNA, and/or fifth tRNA.

[0227] In certain embodiments, the recombinant negative-strand RNA virus genome comprises a nucleic acid encoding a second gRNA, a third gRNA, a fourth gRNA, and/or a fifth gRNA.

[0228] In certain embodiments, the two or more nucleic acids encode identical gRNA. In certain embodiments, the two or more nucleic acids encode at least one different gRNA. In certain embodiments, the nucleotide sequence of the first gRNA and the nucleotide sequence of the second gRNA, a third gRNA, a fourth gRNA, and/or a fifth gRNA are at least 90%, 91%, 92%, 93%, 94%, 95%, 96%, 97%, 98%, 99%, or 100% identical.

[0229] In certain embodiments, the first gRNA and the second gRNA, a third gRNA, a fourth gRNA, and/or a fifth gRNA specifically hybridize to the same target nucleic acid sequence. In certain embodiments, the first gRNA and the second gRNA, a third gRNA, a fourth gRNA, and/or a fifth gRNA specifically hybridize to different target nucleic acid sequence.

[0230] In certain embodiments, the first tRNA, second tRNA, third tRNA, fourth tRNA, and/or fifth tRNA is each selected from the group consisting of: tRNA-ala, tRNA-arg, tRNA-asn, tRNA-asp, tRNA-cys, tRNA-gln, tRNA-gly, tRNA-his, tRNA-ile, tRNA-leu, tRNA-lys, tRNA-met, tRNA-phe, tRNA-pro, tRNA-pyl, tRNA-sec, tRNA-ser, tRNA-thr, tRNA-trp, tRNA-tyr, and tRNA-val.

[0231] In certain embodiments, the nucleic acid encoding the first tRNA, second tRNA, third tRNA, fourth tRNA, and/or fifth tRNA comprises any one of:

(tRNA-pro; SEQ ID NO: 4011)
GGCTCGTTGGTCTAGGGGTATGATTCTCGCTTAGGGTGCGAGAGGTCCCG
GGTTCAAATCCCGGACGAGCCC,
or a sequence at least 90% identical thereto
(e.g., 90%, 91%, 92%, 93%, 94%, 95%, 96%, 97%,
98% or 99%);
(tRNA-thr; SEQ ID NO: 4012)
GGCTCCATAGCTCAGGGGTTAGAGCACTGGTCTTGTAAACCAGGGGTCGC
GAGTTCAATTCTCGCTGGGGCTT,
or a sequence at least 90% identical thereto
(e.g., 90%, 91%, 92%, 93%, 94%, 95%, 96%, 97%,
98% or 99%);
(tRNA-gly G8; SEQ ID NO: 4013)
GCGTTGGTGGTATAGTGGTGAGCATAGCTGCCTTCCAAGCAGTTGACCCG
GGTTCGATTCCCGGCCAACGCA,
or a sequence at least 90% identical thereto
(e.g., 90%, 91%, 92%, 93%, 94%, 95%, 96%, 97%,
98% or 99%);
(tRNA-gly G27; SEQ ID NO: 4014)
GCATGGGTGGTTCAGTGGTAGAATTCTCGCCTGCCACGCGGGAGGCCCGG
GTTCGATTCCCGGCCCATGCA,
or a sequence at least 90% identical thereto
(e.g., 90%, 91%, 92%, 93%, 94%, 95%, 96%, 97%,
98% or 99%);
(tRNA-leu; SEQ ID NO: 4015)
GTCAGGATGGCCGAGCGGTCTAAGGCGCTGCGTTCAGGTCGCAGTCTCCC
CTAGAGGCGTGGGTTCGAATCCCACTCCTGACA,
or a sequence at least 90% identical thereto
(e.g., 90%, 91%, 92%, 93%, 94%, 95%, 96%, 97%,
98% or 99%);
(tRNA-ile; SEQ ID NO: 4016)
GCTCCAGTGGCGCAATCGGTTAGCGCGCGGTACTTATAAGACAGTGCACC
TGTGAGCAATGCCGAGGTTGTGAGTTCAAGCCTCACCTGGAGCA,
or a sequence at least 90% identical thereto
(e.g., 90%, 91%, 92%, 93%, 94%, 95%, 96%, 97%,
98% or 99%);
(tRNA-ser; SEQ ID NO: 4017)
GAAAAAGTCATGGAGGCCATGGGGTTGGCTTGAAACCAGCTTTGGGGGGT
TCGATTCCTTCCTTTTTTGTCT,
or a sequence at least 90% identical thereto
(e.g., 90%, 91%, 92%, 93%, 94%, 95%, 96%, 97%,
98% or 99%);
(tRNA-arg; SEQ ID NO: 4018)
GGGCCAGTGGCGCAATGGATAACGCGTCTGACTACGGATCAGAAGATTCC
AGGTTCGACTCCTGGCTGGCTCGGTGTA,
or a sequence at least 90% identical thereto
(e.g., 90%, 91%, 92%, 93%, 94%, 95%, 96%, 97%,
98% or 99%);
(tRNA-asp1; SEQ ID NO: 4019)
AAACAAGCGCAAGTGGTTTAGTGGTAAAATCCAACGTTGCCATCGTTGGG
CCCCCGGTTCGATTCCGGGCTTGCGCA,
or a sequence at least 90% identical thereto
(e.g., 90%, 91%, 92%, 93%, 94%, 95%, 96%, 97%,
98% or 99%);
(tRNA-asp2; SEQ ID NO: 4020)
AACAAAGCACCAGTGGTCTAGTGGTAGAATAGTACCCTGCCACGGTACAG
ACCCGGGTTCGATTCCCGGCTGGTGCA,
or a sequence at least 90% identical thereto
(e.g., 90%, 91%, 92%, 93%, 94%, 95%, 96%, 97%,
98% or 99%);
or
(tRNA-asp D15; SEQ ID NO: 4021)
TCCTCGTTAGTATAGTGGTGAGTATCCCCGCCTGTCACGCGGGAGACCGG
GGTTCGATTCCCCGACGGGGAG,
or a sequence at least 90% identical thereto
(e.g., 90%, 91%, 92%, 93%, 94%, 95%, 96%, 97%,
98% or 99%).

[0232] In certain embodiments, the recombinant negative-strand RNA virus genome comprises a nucleic acid encoding a negative-strand RNA virus gene.

[0233] In certain embodiments, the recombinant negative-strand RNA virus genome comprises a nucleic acid encoding a transgene (e.g., a nucleobase editor).

[0234] In certain embodiments, the nucleic acid encoding the first gRNA and the nucleic acid encoding the first tRNA are positioned between two nucleic acids each encoding a negative-strand RNA virus gene.

[0235] In certain embodiments, the nucleic acid encoding the first gRNA and the nucleic acid encoding the first tRNA are positioned between two nucleic acids each encoding a transgene.

[0236] In certain embodiments, the nucleic acid encoding the first gRNA and the nucleic acid encoding the first tRNA are positioned between a nucleic acid encoding a negative-strand RNA virus gene and a nucleic acid encoding a transgene.

[0237] In certain embodiments, the recombinant negative-strand RNA virus genome comprises a gRNA expression cassette comprising, from 3′ to 5′, a negative-strand RNA virus transcription initiation signal, a nucleic acid encoding a tRNA, a nucleic acid encoding a gRNA, and a transcription termination polyadenylation signal.

[0238] In certain embodiments, the recombinant negative-strand RNA virus genome comprises a gRNA expression cassette comprising, from 3′ to 5′, a negative-strand RNA virus transcription initiation signal, a nucleic acid encoding the first tRNA, a nucleic acid encoding the first gRNA, a nucleic acid encoding a second tRNA, and a transcription termination polyadenylation signal.

[0239] In certain embodiments, the recombinant negative-strand RNA virus genome comprises a gRNA expression cassette comprising, from 3′ to 5′, a negative-strand RNA virus transcription initiation signal, a nucleic acid encoding the first tRNA, a nucleic acid encoding the first gRNA, a nucleic acid encoding a second tRNA, a nucleic acid encoding a second gRNA, and a transcription termination polyadenylation signal.

[0240] In certain embodiments, the recombinant negative-strand RNA virus genome comprises a gRNA expression cassette comprising, from 3′ to 5′, a negative-strand RNA virus transcription initiation signal, a nucleic acid encoding the first tRNA, a nucleic acid encoding the first gRNA, a nucleic acid encoding a second tRNA, a nucleic acid encoding a second gRNA, and a transcription termination polyadenylation signal.

[0241] In certain embodiments, the recombinant negative-strand RNA virus genome comprises a gRNA expression cassette comprising, from 3′ to 5′, a negative-strand RNA virus transcription initiation signal, a nucleic acid encoding the first tRNA, a nucleic acid encoding the first gRNA, a nucleic acid encoding a second tRNA, a nucleic acid encoding a second gRNA, a nucleic acid encoding a third tRNA, and a transcription termination polyadenylation signal.

[0242] In certain embodiments of the gRNA expression cassette, the nucleic acid encoding the first tRNA, second tRNA, and/or third tRNA are identical. In certain embodiments of the gRNA expression cassette, the nucleic acid encoding the first tRNA, second tRNA, and/or third tRNA are different. In certain embodiments of the gRNA expression cassette, the nucleotide sequence of the first tRNA and the nucleotide sequence of the second tRNA are at least 90%, 91%, 92%, 93%, 94%, 95%, 96%, 97%, 98%, 99%, or 100% identical. In certain embodiments of the gRNA expression cassette, the first tRNA and the second tRNA specify the same amino acid. In certain embodiments of the gRNA expression cassette, the first tRNA and the second tRNA specify different amino acids. In certain embodiments of the gRNA expression cassette, the nucleic acid encoding the first gRNA and/or second gRNA are identical. In certain embodiments of the gRNA expression cassette, the nucleic acid encoding the first gRNA and/or second gRNA are different. In certain embodiments of the gRNA expression cassette, the nucleotide sequence of the first gRNA and the nucleotide sequence of the second gRNA are at least 90%, 91%, 92%, 93%, 94%, 95%, 96%, 97%, 98%, 99%, or 100% identical. In certain embodiments of the gRNA expression cassette, the first gRNA and the second gRNA specifically hybridize to the same target nucleic acid sequence. In certain embodiments of the gRNA expression cassette, the first gRNA and the second gRNA specifically hybridize to different target nucleic acid sequence. In certain embodiments of the gRNA expression cassette, the transcription termination polyadenylation signal comprises an endogenous transcription termination polyadenylation signal. In certain embodiments of the gRNA expression cassette, the transcription termination polyadenylation signal comprises a heterologous transcription termination polyadenylation signal.

[0243] In certain embodiments, the tRNA of the disclosure (e.g., the first, second, third, fourth, or fifth tRNA) comprise a tRNA-like structure. A tRNA-like structure operates in a similar fashion to a tRNA described above. Specifically, the tRNA-like structure is an RNA molecule comprising a secondary structure that can serve as a substrate for cellular RNases involved in tRNA maturation, such as RNAse P or RNase Z. In certain embodiments, tRNA-like structure comprises a tRNA variant, a tRNA fragment, a viral tRNA, or a mascRNA.

MALAT1-Associated Small Cytoplasmic RNA (mascRNA):

[0244] MALAT1-associated small cytoplasmic RNA (mascRNA) are non-coding RNAs found in the cytosol. They are processed from a longer non-coding RNA called MALAT1 by the enzyme RNase P. MascRNAs are structurally similar to tRNA, including the processing by Rnase P, but are not aminoacylated. MascRNA are described in more detail in Wilusz et al. (Cell. 2008 Nov. 28; 135(5): 919-932), the entire contents of which are incorporated herein by reference.

[0245] In certain embodiments, the mascRNA is encoded by a nucleic acid comprising any one of:

(masc_Malat1; SEQ ID NO: X)
AAAAGCAAAAGATGCTGGTGGTTGGCACTCCTGGTTTCCAGGACGGGGTT
CAAATCCCTGCGGCGTCTTTGCTTT,
or a sequence at least 90% identical thereto
(e.g., 90%, 91%, 92%, 93%, 94%, 95%, 96%, 97%,
98% or 99%);
(masc_liz38; SEQ ID NO: X)
AAAGACGCTGGTGGTTGGTGTTTCCAGGACGGGGTTCAAGTCCCTGCGGC
GTCCTCGC,
or a sequence at least 90% identical thereto
(e.g., 90%, 91%, 92%, 93%, 94%, 95%, 96%, 97%,
98% or 99%);
(masc_liz40; SEQ ID NO: X)
GGCTCTGGTGGCTTCCAGGACGGGGTTCAAGTCCCTGCAGTGCCCTTGCT
GA,
or a sequence at least 90% identical thereto
(e.g., 90%, 91%, 92%, 93%, 94%, 95%, 96%, 97%,
98% or 99%);
(masc_turk; SEQ ID NO: X)
AAAGGCGCTGGTGGTGGCACTCCCAGCGGGACGGGGTTCGAATCCCCGCG
GCGCCTCTGC,
or a sequence at least 90% identical thereto
(e.g., 90%, 91%, 92%, 93%, 94%, 95%, 96%, 97%,
98% or 99%);
(hMALAT1.1; SEQ ID NO: X)
GAAGGTTTTTCTTTTCCTGAGAAAACAACACGTATTGTTTTCTCAGGTTT
TGCTTTTTGGCCTTTTTCTAGCTTAAAAAAAAAAGCAAAAGATGCTGGTG
GTTGGCACTCCTGGTTTCCAGGACGGGGTTCAAATCCCTGCGGCGTCTTT
GCTTT,
or a sequence at least 90% identical thereto
(e.g., 90%, 91%, 92%, 93%, 94%, 95%, 96%, 97%,
98% or 99%);
(hMALAT1.2; SEQ ID NO: X)
GCAGGTGTTTCTTTTACTGAGTGCAGCCCATGGCCGCACTCAGGTTTTGC
TTTTCACCTTCCCATCTGTGAAAGAGTGAGCAGGAAAAAGCAAAAGGCGC
TGGTGGTGGCACGTCCAGCACGGCTGGGCCGGGGTTCGAGTCCCCGCAGT
GTTGCTGC,
or a sequence at least 90% identical thereto
(e.g., 90%, 91%, 92%, 93%, 94%, 95%, 96%, 97%,
98% or 99%);
(chimp.1; SEQ ID NO: X)
GAAGGTTTTTCTTTTCCTGAGAAAACAACACGTTTTGTTTTCTCAGGTTT
TGCTTTTTGGCCTTTTTCTAGCTTAAAAAAAAAAGCAAAAGATGCTGGTG
GTTGGCACTCCTGGTTTCCAGGACAGGGTTCAAATCCCTGCGGCGTCTTT
GCTTT,
or a sequence at least 90% identical thereto
(e.g., 90%, 91%, 92%, 93%, 94%, 95%, 96%, 97%,
98% or 99%);
(chimp.1 short; SEQ ID NO: X)
AAAGCAAAAGATGCTGGTGGTTGGCACTCCTGGTTTCCAGGACAGGGTTC
AAATCCCTGCGGCGTCTTTGCTTT,
or a sequence at least 90% identical thereto
(e.g., 90%, 91%, 92%, 93%, 94%, 95%, 96%, 97%,
98% or 99%);
(chimp.2; SEQ ID NO: X)
GCAGGTGTTTCTTTTACTGAGTGCAGCCCATGGCCGCACTCAGGTTTTGC
TTTTCACCTTCCCATCTGTGAAAGAGTGAGCAGGAAAAAGCAAAAGGCGC
TGGTGGTGGCACGTCCAGCACGGCTGGGCCGGGGTTCGAGTCCCCGCAGT
GTTGCTGC,
or a sequence at least 90% identical thereto
(e.g., 90%, 91%, 92%, 93%, 94%, 95%, 96%, 97%, 98%
or 99%);
(MoTse.1; SEQ ID NO: X)
AAAGGTTTTTCTTTTCCTGAGAAAACAACCTTTTGTTTTCTCAGGTTTTG
CTTTTTGGCCTTTCCCTAGCTTTAAAAAAAAAAGCAAAAGACGCTGGTGG
CTGGCACTCCTGGTTTCCAGGACGGGGTTCAAGTCCCTGCGGTGTCTTTG
C,
or a sequence at least 90% identical thereto
(e.g., 90%, 91%, 92%, 93%, 94%, 95%, 96%, 97%,
98% or 99%);
(MoTse.1 short; SEQ ID NO: X)
AAAGCAAAAGACGCTGGTGGCTGGCACTCCTGGTTTCCAGGACGGGGTTC
AAGTCCCTGCGGTGTCTTTGCTTGAC,
or a sequence at least 90% identical thereto
(e.g., 90%, 91%, 92%, 93%, 94%, 95%, 96%, 97%,
98% or 99%);
or
(MoTse.2; SEQ ID NO: X)
GCAGGTGTTTCTTTTCCTGACCGCGGCTCATGGCCGCGCTCAGGTTTTGC
TTTTCACCTTTGTCTGAGAGAACGAACGTGAGCAGGAAAAAGCAAAAGGC
ACTGGTGGCGGCACGCCCGCACCTCGGGCCAGGGTTCGAGTCCCTGCAGT
ACCGTGC,
or a sequence at least 90% identical thereto
(e.g., 90%, 91%, 92%, 93%, 94%, 95%, 96%, 97%,
98% or 99%).

### Transfer RNA Variants:

[0246] A tRNA variant is a tRNA that comprises one or more nucleotide substitutions or deletions relative to a wild-type tRNA or unsubstituted tRNA. The substitutions may be employed to enhance stability of the tRNA variant relative to the corresponding wild-type or unsubstituted tRNA. In certain embodiments, the tRNA variant comprises a substitution of one or more A and/or T nucleotides with a G or C nucleotide. In certain embodiments, the tRNA variant comprises a lower A and/or T nucleotide content relative to a wild-type tRNA.

[0247] In certain embodiments, the tRNA variant is encoded by a nucleic acid comprising any one of:

(tRNA-pro var1; SEQ ID NO: X)
GGCTCGTTGGCCTAGGGGTATGGCTCCCGCTTAGGGTGCGGGAGGTCCCGG
GTTCAAATCCCGGACGAGCC,
or a sequence at least 90% identical thereto
(e.g., 90%, 91%, 92%, 93%, 94%, 95%, 96%, 97%, 98%
or 99%);
(tRNA-pro var2; SEQ ID NO: X)
GGCTCGTTGGCCTAGGGGTATGGCTGAAAAGGTCCCGGGTTCAAATCCCGG
ACGAGCC,
or a sequence at least 90% identical thereto
(e.g., 90%, 91%, 92%, 93%, 94%, 95%, 96%, 97%, 98%
or 99%);
(tRNA-pro var3; SEQ ID NO: X)
GGCTCGTTGAAAGAAAAGGTCCCGGGTTCAAATCCCGGACGAGCC,
or a sequence at least 90% identical thereto
(e.g., 90%, 91%, 92%, 93%, 94%, 95%,96%, 97%, 98%
or 99%);
(tRNA-thr var1; SEQ ID NO: X)
GGCTCCATAGCGCAGGGGTTAGCGCACCGGTCTTGTAAACCGGGGGTCGCG
AGTTCAATTCTCGCTGGGGCTT,
or a sequence at least 90% identical thereto (e.g.,
90%, 91%, 92%, 93%, 94%, 95%, 96%, 97%, 98% or
99%);
(tRNA-thr var2; SEQ ID NO: X)
GGCTCCATAGCGCAGGGGTTAGCGCAGAAAGGGTCGCGAGTTCAATTCTCG
CTGGGGCTT,
or a sequence at least 90% identical thereto (e.g.,
90%, 91%, 92%, 93%, 94%, 95%, 96%, 97%, 98% or 99%);
or
(tRNA-thr var3; SEQ ID NO: X)
GGCTCCATAGAAAGAAAGAAAGGGTCGCGAGTTCAATTCTCGCTGGGGCT
T,
or a sequence at least 90% identical thereto
(e.g., 90%, 91%, 92%, 93%, 94%, 95%, 96%, 97%, 98%
or 99%).

### Transfer RNA Fragments:

[0248] A tRNA fragment is a tRNA that comprises a truncation relative to a wild-type tRNA or unsubstituted tRNA. In certain embodiments, the tRNA fragment comprises a split tRNA comprising two separate tRNA portions that are capable of hybridizing to form an intact tRNA. A tRNA fragment, including a split tRNA, retains Rnase P cleavage capacity.

Viral tRNA-Like Structures:

[0249] Viral tRNA-like structures (vtRNAs) are expressed from viral genomes and processed by cellular machinery much like an endogenous tRNA. The vtRNAs are described in more detail in Bowden et al. (J. Gen Virol. 78: 1675-1687. 1997), and Dreher (Wiley Interdiscip Rev RNA. 1(3): 402-14. 2010), each of which is incorporated herein by reference.

[0250] In certain embodiments, the vtRNA is derived from a gamma-Herpes virus (GHV68).

[0251] In certain embodiments, the vtRNA is encoded by a nucleic acid comprising any one of:

(vtRNA-1; SEQ ID NO: X)
GCCAGAGTAGCTCAATTGGTAGAGCAACAGGTCACCGATCCTGGTGGTTCT
CGGTTCAAGTCCGAGCTCTGGTC,
or a sequence at least 90% identical thereto (e.g.,
90%, 91%, 92%, 93%, 94%, 95%, 96%, 97%, 98% or
99%);
(vtRNA-2; SEQ ID NO: X)
GCCAGGGTAGCTCAATCGGTAGAGCAGCGGTTCCTGGAGTCCGCTGGTTCT
CGGTTCAAGCCCGAGCCCTGGTTG,
or a sequence at least 90% identical thereto (e.g.,
90%, 91%, 92%, 93%, 94%, 95%, 96%, 97%, 98% or
99%);
(vtRNA-3; SEQ ID NO: X)
GTCGGGGTAGCTCAAATGGTAGAGTGGCAGGCCAACATAGCCAGCAGATCT
CGGTTCAAACCCGAGCCCTGACCA,
or a sequence at least 90% identical thereto (e.g.,
90%, 91%, 92%, 93%, 94%, 95%, 96%, 97%, 98% or
99%);
(vtRNA-4; SEQ ID NO: X)
GTCGGGGTAGCTCAATTGGTAGAGCGGCAGGCTCATCCCCTGCAGGTTCTC
GGTTCAATCCCGGGTCCCGACGC,
or a sequence at least 90% identical thereto (e.g.,
90%, 91%, 92%, 93%, 94%, 95%, 96%, 97%, 98% or 99%);
(vtRNA-5; SEQ ID NO: X)
GCCAGGGTAGCTCAATTGGTAGAGCATCAGGCTAGTATCCTGTCGGTTCCG
GTTCAAGTCCGGGCCCTGGTTA,
or a sequence at least 90% identical thereto (e.g.,
90%, 91%, 92%, 93%, 94%, 95%, 96%, 97%, 98% or
99%);
(vtRNA-6; SEQ ID NO: X)
GCCAGCGTAGCTCAATTGTTAGAGCAGCGGCCACCAAGCCTGCAGGTTCTC
GGTTCAAGTCCGGGCGCTGGCAT,
or a sequence at least 90% identical thereto (e.g.,
90%, 91%, 92%, 93%, 94%, 95%, 96%, 97%, 98% or
99%);
(vtRNA-7; SEQ ID NO: X)
GCCAGGGTAGCTCAATTGGTAGAGCGGCAGACACCACCTACGTGGTCTAGT
CTGTGGATCTCGGTTCAAGTCCGAGTCCTGGCCA,
or a sequence at least 90% identical thereto (e.g.,
90%, 91%, 92%, 93%, 94%, 95%, 96%, 97%, 98% or
99%);
(vtRNA-7; SEQ ID NO: X)
GCCAGGGTAGCTCAATTGGTAGAGCGGCAGACACCACCTACGTGGTCTAGT
CTGTGGATCTCGGTTCAAGTCCGAGTCCTGGCCA,
or a sequence at least 90% identical thereto (e.g.,
90%, 91%, 92%, 93%, 94%, 95%, 96%, 97%, 98% or
99%);
or
(vtRNA-8; SEQ ID NO: X)
ACCAGAGTGGCTCACCTGGTAGAGCACCAGGCTGCCCATCCTGTTGGTTCT
CGGTTCAAATCCGAGCTCTGGTGA,
or a sequence at least 90% identical thereto (e.g.,
90%, 91%, 92%, 93%, 94%, 95%, 96%, 97%, 98% or
99%).

[0252] In certain embodiments, the negative-strand RNA virus genome is a recombinant rhabdovirus genome.

[0253] In certain embodiments, the negative-strand RNA virus genome is a recombinant lyssavirus genome. In certain embodiments, the recombinant lyssavirus genome is a recombinant rabies virus genome.

### D. Therapeutic Transgenes

[0254] In certain embodiments, a recombinant rabies virus genome of the present disclosure encodes a nucleic acid comprising a therapeutic transgene. As used herein, the term “therapeutic” refers to treatment and/or prophylaxis. As used herein, the term “therapeutic transgene” refers to a transgene that encodes a transgene product that is capable of effecting treatment and/or prophylaxis to a subject in need. In certain embodiments, the therapeutic effect is accomplished by suppression, remission, or eradication of a disease state suffered by the subject. The therapeutic transgene may encode any therapeutic agent that is capable of effecting treatment and/or prophylaxis in a subject in need, resulting in suppression, remission, or eradication of a disease state in the subject. In certain embodiments, the therapeutic transgene encodes a precursor of a transgene product that is capable of effecting treatment and/or prophylaxis to a subject in need thereof once processed, e.g., processed in a cell.

[0255] In certain embodiments, the nucleic acid encoding the therapeutic transgene is greater than: about 300 bp, about 400 bp, about 500 bp, about 600 bp, about 700 bp, about 800 bp, about 900 bp, about 1,000 bp, about 1,100 bp, about 1,200 bp, about 1,300 bp, about 1,400 bp, about 1,500 bp, about 1,600 bp, about 1,700 bp, about 1,800 bp, about 1,900 bp, about 2,000 bp, about 2,100 bp, about 2,200 bp, about 2,300 bp, about 2,400 bp, about 2,500 bp, about 2,600 bp, about 2,700 bp, about 2,800 bp, about 2,900 bp, or about 3,000 bp.

[0256] In certain embodiments, the nucleic acid encoding the therapeutic transgene is greater than about 300 bp (e.g., the therapeutic transgene is about 350 bp, about 400 bp, about 450 bp, about 500 bp, about 550 bp, about 600 bp, or about 650 bp). In certain embodiments, the nucleic acid encoding the therapeutic transgene is greater than about 650 bp (e.g., the therapeutic transgene is about 700 bp, about 750 bp, about 800 bp, about 850 bp, about 900 bp, about 950 bp, or about 1,000 bp). In certain embodiments, the nucleic acid encoding the therapeutic transgene is greater than about 1,000 bp (e.g., the therapeutic transgene is about 1,500 bp, about 2,000 bp, about 2,500 bp, or about 3,000 bp). In certain embodiments, the nucleic acid encoding the therapeutic transgene is greater than about 3,000 bp (e.g., the therapeutic transgene is about 3,500 bp, about 4,000 bp, or about 4,500 bp).

[0257] In certain embodiments, the nucleic acid encoding the therapeutic transgene is greater than about 4,500 bp (e.g., the therapeutic transgene is about 5,000 bp, about 5,500 bp, about 6,000 bp, about 6,500 bp, about 7,000 bp, about 7,500 bp, about 8,000 bp, or about 8,500 bp).

[0258] In certain embodiments, the nucleic acid encoding the therapeutic transgene is greater than about 8,500 bp (e.g., the therapeutic transgene is about 9,000 bp, about 9,500 bp, or about 10,000 bp).

[0259] In certain embodiments, the nucleic acid encoding the therapeutic transgene is greater than about 10,000 bp (e.g., the therapeutic transgene is about 10,500 bp, about 11,000 bp, about 11,500 bp, about 12,000 bp, about 12,500 bp, about 13,000 bp, about 13,500 bp, about 14,000 bp, about 14,500 bp, or about 15,000 bp).

[0260] In certain embodiments, the nucleic acid encoding the therapeutic transgene is between about 4,000 bp and about 6,000 bp (e.g., the therapeutic transgene is about 4,000 bp, about 4,500 bp, about 5,000 bp, about 5,500 bp, or about 6,000 bp).

[0261] In certain embodiments, the therapeutic transgene encodes a therapeutic nucleic acid. The therapeutic transgene may encode any therapeutic nucleic acid known in the art, for example, without limitation, any antisense RNA (single-stranded RNA), any small interfering RNA (double-stranded RNA), any RNA aptamer, and/or any messenger RNA (mRNA). For example, the therapeutic transgene can encode, without limitation, a miRNA, a miRNA mimic, a siRNA, a shRNA, a gRNA, a long noncoding RNA, an enhancer RNA, a RNA aptazyme, a RNA aptamer, an antagomiR, and/or a synthetic RNA. In certain embodiments, a therapeutic nucleic acid may be a RNA binding site, e.g., a miRNA binding site. Various other types of therapeutic nucleic acids are known to those of ordinary skill in the art.

[0262] In certain embodiments, the therapeutic transgene encodes a therapeutic polypeptide. The therapeutic transgene may encode any therapeutic polypeptide known in the art, for example, without limitation, a therapeutic polypeptide that can replace a deficient or abnormal protein; a therapeutic polypeptide that can augment an existing pathway; a therapeutic polypeptide that can provide a novel function or activity (e.g., a novel function or activity beneficial to a subject suffering from the lack thereof); a therapeutic polypeptide that interferes with a molecule or an organism (e.g., an organism that is different to the organism that hosts the target cell); and/or a therapeutic polypeptide that delivers other compounds or proteins (e.g., a radionuclide, a cytotoxic drug, and/or an effector protein). For example, the therapeutic transgene can encode, without limitation, a nucleic acid modifying protein (e.g., an adenine or cytidine base editor) or system, an antibody or antibody-based drug, an anticoagulant, a blood factor, a bone morphogenetic protein, an engineered protein scaffold, an enzyme, an Fc fusion protein, a growth factor, a hormone, an interferon, an interleukin, and/or a thrombolytic. Various other types of therapeutic polypeptides are known to those of ordinary skill in the art.

[0263] In certain embodiments, the therapeutic transgene encodes a nucleic acid modifying protein. In some embodiments the therapeutic transgene encodes a protein comprising a nucleic acid binding protein (e.g., a zinc finger, a TALE, or a nucleic acid programmable nucleic acid binding protein, such as Cas-9). In some embodiments, the nucleic acid editing system component is a guide RNA (gRNA).

[0264] In some embodiments, the therapeutic transgene encodes a CRISPR system. In some embodiments, the CRISPR system comprises a nucleobase editor comprising a polynucleotide programmable nucleotide binding domain and a nucleobase editing domain. In some embodiments, the nucleobase editing domain is an adenosine deaminase, cytidine deaminase, cytosine deaminase, or a functional variant thereof (e.g, a functional variant capable of deaminating a nucleobase in a nucleic acid molecule such as DNA or RNA). In some embodiments, the nucleobase editing domain is an adenosine deaminase. In some embodiments, the adenosine deaminase is ABE7.10. In some embodiments, the polynucleotide programmable nucleotide binding domain is a Cas9 polypeptide, a Cas12 polypeptide, or a functional variant thereof. In some embodiments, the CRISPR system further comprises a guide RNA (gRNA) or a nucleic acid encoding a gRNA.

[0265] In some embodiments the therapeutic transgene encodes a nucleobase modifying protein (e.g., a base editor protein). In some embodiments the therapeutic transgene encodes an adenosine base editor (e.g., ABE7.10). In some embodiments the therapeutic transgene encodes a cytidine base editor. In some embodiments the therapeutic transgene encodes a cytosine base editor capable of deaminating a cytosine in DNA or RNA.

[0266] In certain embodiments, the therapeutic transgene encodes a gene editing system, e.g., a base editor system further described herein.

[0267] It will be readily apparent to those of ordinary skill in the art that a recombinant rabies virus genome of the present disclosure described herein encodes a nucleic acid comprising a therapeutic transgene, wherein the therapeutic transgene encodes a therapeutic polypeptide and/or a therapeutic nucleic acid, e.g., in certain embodiments, the therapeutic transgene encodes a combination of the therapeutic polypeptide and the therapeutic nucleic acid. In certain embodiments, the therapeutic transgene encodes one or more therapeutic polypeptides. In certain embodiments, the therapeutic transgene encodes one or more therapeutic nucleic acids. In certain embodiments, the therapeutic transgene encodes a combination of one or more therapeutic polypeptides and one or more therapeutic nucleic acids. Delivery of a combination of a therapeutic polypeptide and therapeutic nucleic acid into a target cell may serve various purposes known to those of ordinary skill in the art. In certain embodiments, a therapeutic polypeptide may be delivered to a target cell, wherein the delivery is detargeted to certain other cell types. For example, a therapeutic transgene can encode a therapeutic polypeptide and/or therapeutic nucleic acid, and also comprise a miRNA binding site. The miRNA binding site may function for cell type detargeting. For example, miRNA122a, which is expressed exclusively in liver, can be employed for hepatocyte detargeting. See, e.g., Dhungel et al., Molecules (2018) 23(7): 1500.

[0268] In certain embodiments, the therapeutic transgene further encodes one or more reporter sequences. Reporter sequences when expressed in the target cell, produces a directly or an indirectly detectable signal. Examples of suitable reporter sequences include, without limitation, sequences encoding for fluorescent proteins (e.g., GFP, RFP, YFP), alkaline phosphatase, thymidine kinase, chloramphenicol acetyltransferase (CAT), luciferase, β-galactosidase (LacZ), and β-lactamase. Sequences encoding for cell surface membrane-bound proteins may also be suitable as reporter sequences, for example, membrane-bound proteins to which high affinity antibodies bind, e.g., influenza hemagglutinin protein (HA), CD2, CD4, CD8, and others known to those of ordinary skill in the art, including, e.g., membrane-bound proteins tagged with an antigen domain (e.g., an HA tag, a FLAG tag, a Myc tag, a polyhistidine tag).

[0269] In certain embodiments, the therapeutic transgene encodes for a therapeutic polypeptide and/or a therapeutic nucleic acid, wherein the therapeutic polypeptide and/or the therapeutic nucleic acid are secreted. For example, a recombinant rabies virus genome of the present disclosure described herein may be introduced into a target cell, wherein the recombinant rabies virus genome encodes a nucleic acid comprising a therapeutic transgene, and wherein the therapeutic transgene encodes a therapeutic polypeptide and/or a therapeutic nucleic acid that is secreted (e.g., a secretable therapeutic transgene and/or a secretable therapeutic nucleic acid). The therapeutic polypeptide and/or nucleic acid upon expression, may be secreted outside of the target cell. In certain embodiments, the therapeutic polypeptide and/or nucleic acid, upon expression, is secreted by virtue of endogenous elements that reside on the therapeutic polypeptide and/or nucleic acid (e.g., an endogenous signal peptide that directs extracellular secretion). In certain embodiments, the therapeutic polypeptide and/or nucleic acid, upon expression, is secreted by virtue of exogenous elements that reside on the therapeutic polypeptide and/or nucleic acid (e.g., an exogenous signal peptide that directs extracellular secretion). Delivery of secretable therapeutic polypeptides and/or nucleic acids are useful in the treatment of certain diseases. For example, lysosomal storage disorders (LSD) that result from the metabolic dysfunction of the lysosome comprise a unique cross-correction characteristic that allows specific extracellular LSD enzymes to be taken up and targeted to the lysosomes of enzyme-deficient or enzyme-abnormal cells. Cross-correction characteristics of certain enzymes form the basis of approved therapies known as enzyme replacement therapies. See, e.g., Rastall and Amalfitano, Appl. Clin. Genet. (2015) 8: 157-169.

[0270] In certain embodiments, a recombinant rabies virus genome of the present disclosure comprises a transcriptional regulatory element operably linked to the nucleic acid encoding a transgene. The transcriptional regulatory element is capable of controlling the expression of the transgene (e.g., expression of the encoded therapeutic polypeptide and/or nucleic acid) that is operably linked thereto. In certain embodiments, the transcriptional regulatory element comprises a transcription initiation signal. The transcription initiation signal can be endogenous or exogenous to the rabies virus. In certain embodiments, the transcription initiation signal is a synthetic transcription initiation signal. In certain embodiments, the nucleic acid encoding a transgene is further operably linked to a transcription termination polyadenylation signal. The transcription termination polyadenylation signal can be endogenous or exogenous to the rabies virus. In certain embodiments, the transcription termination polyadenylation signal is a synthetic transcription termination polyadenylation signal. Examples of suitable transcription initiation signals and transcriptional termination polyadenylaton signals are known to those of ordinary skill in the art, and are described in, e.g., Albertini et al., Adv. Virus. Res. (2011) 79: 1-22; Ogino and Green, Viruses (2019) 11(6): 504; and Ogino and Green, Front. Microbiol. (2019) 10: 1490, the disclosures of which are herein incorporated by reference in their entireties.

[0271] A recombinant rabies virus genome of the present disclosure comprising a nucleic acid comprising a therapeutic transgene may further comprise any elements known to those of ordinary skill in the art that aid and/or enhance in the expression of the therapeutic transgene.

[0272] Recombinant rabies virus genomes of the present disclosure are incorporated into a recombinant rabies virus particle by methods described herein. In certain embodiments, a recombinant rabies virus particle of the present disclosure comprises a rabies virus glycoprotein and a recombinant rabies virus genome comprising a nucleic acid comprising a therapeutic transgene as described herein. In certain embodiments, the recombinant rabies virus particle comprises: a rabies virus glycoprotein; and a recombinant rabies virus genome comprising a nucleic acid comprising a therapeutic transgene, wherein the genome lacks an endogenous G gene encoding for a rabies virus glycoprotein. In certain embodiments, the recombinant rabies virus particle comprises: a rabies virus glycoprotein; and a recombinant rabies virus genome comprising a nucleic acid comprising a therapeutic transgene, wherein the genome lacks an endogenous G gene encoding for a rabies virus glycoprotein; and wherein the genome lacks an endogenous L gene encoding for a rabies virus polymerase.

[0273] Recombinant negative-strand viral genomes (e.g., rabies virus genomes) and therapeutic transgenes encoded in the same are described in further detail in PCT/US2022/017075, filed Feb. 18, 2022, the entire disclosure of which is incorporated herein by reference.

### E. Nucleobase Editors

[0274] In certain exemplary embodiments, therapeutic transgenes useful in the methods and compositions described herein are nucleobase editors that edit, modify or alter a target nucleotide sequence of a polynucleotide. Nucleobase editors described herein typically include a polynucleotide programmable nucleotide binding domain and a nucleobase editing domain (e.g., adenosine deaminase or cytidine deaminase). A polynucleotide programmable nucleotide binding domain, when in conjunction with a bound guide polynucleotide (e.g., gRNA), can specifically bind to a target polynucleotide sequence and thereby localize the base editor to the target nucleic acid sequence desired to be edited.

### Polynucleotide Programmable Nucleotide Binding Domain

[0275] Polynucleotide programmable nucleotide binding domains bind polynucleotides (e.g., RNA, DNA). A polynucleotide programmable nucleotide binding domain of a base editor can itself comprise one or more domains (e.g., one or more nuclease domains). In some embodiments, the nuclease domain of a polynucleotide programmable nucleotide binding domain can comprise an endonuclease or an exonuclease. An endonuclease can cleave a single strand of a double-stranded nucleic acid or both strands of a double-stranded nucleic acid molecule. In some embodiments, a nuclease domain of a polynucleotide programmable nucleotide binding domain can cut zero, one, or two strands of a target polynucleotide.

[0276] Non-limiting examples of a polynucleotide programmable nucleotide binding domain which can be incorporated into a base editor include a CRISPR protein-derived domain, a restriction nuclease, a meganuclease, TAL nuclease (TALEN), and a zinc finger nuclease (ZFN). In some embodiments, a base editor comprises a polynucleotide programmable nucleotide binding domain comprising a natural or modified protein or portion thereof which via a bound guide nucleic acid is capable of binding to a nucleic acid sequence during CRISPR (i.e., Clustered Regularly Interspaced Short Palindromic Repeats)-mediated modification of a nucleic acid. Such a protein is referred to herein as a “CRISPR protein.” Accordingly, disclosed herein is a base editor comprising a polynucleotide programmable nucleotide binding domain comprising all or a portion of a CRISPR protein (i.e. a base editor comprising as a domain all or a portion of a CRISPR protein, also referred to as a “CRISPR protein-derived domain” of the base editor). A CRISPR protein-derived domain incorporated into a base editor can be modified compared to a wild-type or natural version of the CRISPR protein. For example, as described below a CRISPR protein-derived domain can comprise one or more mutations, insertions, deletions, rearrangements and/or recombinations relative to a wild-type or natural version of the CRISPR protein.

[0277] Cas proteins that can be used herein include class 1 and class 2. Non-limiting examples of Cas proteins include Cas1, Cas1B, Cas2, Cas3, Cas4, Cas5, Cas5d, Cas5t, Cas5h, Cas5a, Cas6, Cas7, Cas8, Cas9 (also known as Csn1 or Csx12), Cas10, Csy1, Csy2, Csy3, Csy4, Cse1, Cse2, Cse3, Cse4, Cse5e, Csc1, Csc2, Csa5, Csn1, Csn2, Csm1, Csm2, Csm3, Csm4, Csm5, Csm6, Cmr1, Cmr3, Cmr4, Cmr5, Cmr6, Csb1, Csb2, Csb3, Csx17, Csx14, Csx10, Csx16, CsaX, Csx3, Csx1, Csx1S, Csf1, Csf2, CsO, Csf4, Csd1, Csd2, Cst1, Cst2, Csh1, Csh2, Csa1, Csa2, Csa3, Csa4, Csa5, Cas12a/Cpf1, Cas12b/C2c1 (e.g., SEQ ID NO: 258), Cas12c/C2c3, Cas12d/CasY, Cas12e/CasX, Cas12g, Cas12h, Cas12i, and Cas12j/Casϕ, CARF, DinG, homologues thereof, or modified versions thereof. A CRISPR enzyme can direct cleavage of one or both strands at a target sequence, such as within a target sequence and/or within a complement of a target sequence. For example, a CRISPR enzyme can direct cleavage of one or both strands within about 1, 2, 3, 4, 5, 6, 7, 8, 9, 10, 15, 20, 25, 50, 100, 200, 500, or more base pairs from the first or last nucleotide of a target sequence.

[0278] A vector that encodes a CRISPR enzyme that is mutated to with respect, to a corresponding wild-type enzyme such that the mutated CRISPR enzyme lacks the ability to cleave one or both strands of a target polynucleotide containing a target sequence can be used. A Cas protein (e.g., Cas9, Cas12) or a Cas domain (e.g., Cas9, Cas12) can refer to a polypeptide or domain with at least or at least about 50%, 60%, 70%, 80%, 90%, 91%, 92%, 93%, 94%, 95%, 96%, 97%, 98%, 99%, or 100% sequence identity and/or sequence homology to a wild-type exemplary Cas polypeptide or Cas domain. Cas (e.g., Cas9, Cas12) can refer to the wild-type or a modified form of the Cas protein that can comprise an amino acid change such as a deletion, insertion, substitution, variant, mutation, fusion, chimera, or any combination thereof.

[0279] In some embodiments, a CRISPR protein-derived domain of a base editor can include all or a portion of Cas9 from Corynebacterium ulcerans (NCBI Refs: NC_015683.1, NC_017317.1); Corynebacterium diphtheria (NCBI Refs: NC_016782.1, NC_016786.1); Spiroplasma syrphidicola (NCBI Ref: NC_021284.1); Prevotella intermedia (NCBI Ref: NC_017861.1); Spiroplasma taiwanense (NCBI Ref: NC_021846.1); Streptococcus iniae (NCBI Ref: NC_021314.1); Belliella baltica (NCBI Ref: NC_018010.1); Psychroflexus torquis (NCBI Ref: NC_018721.1); Streptococcus thermophilus (NCBI Ref: YP_820832.1); Listeria innocua (NCBI Ref: NP_472073.1); Campylobacter jejuni (NCBI Ref: YP_002344900.1); Neisseria meningitidis (NCBI Ref: YP_002342100.1), Streptococcus pyogenes, or Staphylococcus aureus.

[0280] Cas9 nuclease sequences and structures are well known to those of skill in the art (See, e.g., “Complete genome sequence of an MI strain of Streptococcus pyogenes.” Ferretti et al., Proc. Natl. Acad. Sci. U.S.A. 98:4658-4663(2001); “CRISPR RNA maturation by trans-encoded small RNA and host factor RNase III.” Deltcheva E., et al., Nature 471:602-607(2011); and “A programmable dual-RNA-guided DNA endonuclease in adaptive bacterial immunity.” Jinek M., et al., Science 337:816-821(2012), the entire contents of each of which are incorporated herein by reference). Cas9 orthologs have been described in various species, including, but not limited to, S. pyogenes and S. thermophilus. Additional suitable Cas9 nucleases and sequences will be apparent to those of skill in the art based on this disclosure, and such Cas9 nucleases and sequences include Cas9 sequences from the organisms and loci disclosed in Chylinski, Rhun, and Charpentier, “The tracrRNA and Cas9 families of type II CRISPR-Cas immunity systems” (2013) RNA Biology 10:5, 726-737; the entire contents of which are incorporated herein by reference.

[0281] High Fidelity Cas9 Domains

[0282] Some aspects of the disclosure provide high fidelity Cas9 domains. High fidelity Cas9 domains are known in the art and described, for example, in Kleinstiver, B. P., et al. “High-fidelity CRISPR-Cas9 nucleases with no detectable genome-wide off-target effects.” Nature 529, 490-495 (2016); and Slaymaker, I. M., et al. “Rationally engineered Cas9 nucleases with improved specificity.” Science 351, 84-88 (2015); the entire contents of each of which are incorporated herein by reference. An Exemplary high fidelity Cas9 domain is provided in the Sequence Listing as SEQ ID NO: 1423. In some embodiments, high fidelity Cas9 domains are engineered Cas9 domains comprising one or more mutations that decrease electrostatic interactions between the Cas9 domain and the sugar-phosphate backbone of a DNA, relative to a corresponding wild-type Cas9 domain. High fidelity Cas9 domains that have decreased electrostatic interactions with the sugar-phosphate backbone of DNA have less off-target effects. In some embodiments, the Cas9 domain (e.g., a wild type Cas9 domain (SEQ ID NOs: 223 and 233)) comprises one or more mutations that decrease the association between the Cas9 domain and the sugar-phosphate backbone of a DNA. In some embodiments, a Cas9 domain comprises one or more mutations that decreases the association between the Cas9 domain and the sugar-phosphate backbone of DNA by at least 1%, at least 2%, at least 3%, at least 4%, at least 5%, at least 10%, at least 15%, at least 20%, at least 25%, at least 30%, at least 35%, at least 40%, at least 45%, at least 50%, at least 55%, at least 60%, at least 65%, or at least 70%.

[0283] In some embodiments, any of the Cas9 fusion proteins provided herein comprise one or more of a D10A, N497X, a R661X, a Q695X, and/or a Q926X mutation, or a corresponding mutation in any of the amino acid sequences provided herein, wherein X is any amino acid. In some embodiments, the high fidelity Cas9 enzyme is SpCas9(K855A), eSpCas9(1.1), SpCas9-HF1, or hyper accurate Cas9 variant (HypaCas9). In some embodiments, the modified Cas9 eSpCas9(1.1) contains alanine substitutions that weaken the interactions between the HNH/RuvC groove and the non-target DNA strand, preventing strand separation and cutting at off-target sites. Similarly, SpCas9-HF1 lowers off-target editing through alanine substitutions that disrupt Cas9's interactions with the DNA phosphate backbone. HypaCas9 contains mutations (SpCas9 N692A/M694A/Q695A/H698A) in the REC3 domain that increase Cas9 proofreading and target discrimination. All three high fidelity enzymes generate less off-target editing than wildtype Cas9.

[0284] Cas9 Domains with Reduced Exclusivity

[0285] Typically, Cas9 proteins, such as Cas9 from S. pyogenes (spCas9), require a “protospacer adjacent motif (PAM)” or PAM-like motif, which is a 2-6 base pair DNA sequence immediately following the DNA sequence targeted by the Cas9 nuclease in the CRISPR bacterial adaptive immune system. The presence of an NGG PAM sequence is required to bind a particular nucleic acid region, where the “N” in “NGG” is adenosine (A), thymidine (T), or cytosine (C), and the G is guanosine. This may limit the ability to edit desired bases within a genome. In some embodiments, the base editing fusion proteins provided herein may need to be placed at a precise location, for example a region comprising a target base that is upstream of the PAM. See e.g., Komor, A. C., et al., “Programmable editing of a target base in genomic DNA without double-stranded DNA cleavage” Nature 533, 420-424 (2016), the entire contents of which are hereby incorporated by reference. Exemplary polypeptide sequences for spCas9 proteins capable of binding a PAM sequence are provided in the Sequence Listing as SEQ ID NOs: 223, 234, and 1304-1307. Accordingly, in some embodiments, any of the fusion proteins provided herein may contain a Cas9 domain that is capable of binding a nucleotide sequence that does not contain a canonical (e.g., NGG) PAM sequence. Cas9 domains that bind to non-canonical PAM sequences have been described in the art and would be apparent to the skilled artisan. For example, Cas9 domains that bind non-canonical PAM sequences have been described in Kleinstiver, B. P., et al., “Engineered CRISPR-Cas9 nucleases with altered PAM specificities” Nature 523, 481-485 (2015); and Kleinstiver, B. P., et al., “Broadening the targeting range of Staphylococcus aureus CRISPR-Cas9 by modifying PAM recognition” Nature Biotechnology 33, 1293-1298 (2015); the entire contents of each are hereby incorporated by reference.

[0286] Nickases

[0287] In some embodiments, the polynucleotide programmable nucleotide binding domain can comprise a nickase domain. Herein the term “nickase” refers to a polynucleotide programmable nucleotide binding domain comprising a nuclease domain that is capable of cleaving only one strand of the two strands in a duplexed nucleic acid molecule (e.g., DNA). In some embodiments, a nickase can be derived from a fully catalytically active (e.g., natural) form of a polynucleotide programmable nucleotide binding domain by introducing one or more mutations into the active polynucleotide programmable nucleotide binding domain. For example, where a polynucleotide programmable nucleotide binding domain comprises a nickase domain derived from Cas9, the Cas9-derived nickase domain can include a D10A mutation and a histidine at position 840. In such embodiments, the residue H840 retains catalytic activity and can thereby cleave a single strand of the nucleic acid duplex. In another example, a Cas9-derived nickase domain can comprise an H840A mutation, while the amino acid residue at position 10 remains a D. In some embodiments, a nickase can be derived from a fully catalytically active (e.g., natural) form of a polynucleotide programmable nucleotide binding domain by removing all or a portion of a nuclease domain that is not required for the nickase activity. For example, where a polynucleotide programmable nucleotide binding domain comprises a nickase domain derived from Cas9, the Cas9-derived nickase domain can comprise a deletion of all or a portion of the RuvC domain or the HNH domain.

[0288] In some embodiments, wild-type Cas9 corresponds to, or comprises the following amino acid sequence:

(SEQ ID NO: 223)
[sequence omitted]
(single underline: HNH domain; double underline:
RuvC domain).

[0289] In some embodiments, the strand of a nucleic acid duplex target polynucleotide sequence that is cleaved by a base editor comprising a nickase domain (e.g., Cas9-derived nickase domain, Cas12-derived nickase domain) is the strand that is not edited by the base editor (i.e., the strand that is cleaved by the base editor is opposite to a strand comprising a base to be edited). In other embodiments, a base editor comprising a nickase domain (e.g., Cas9-derived nickase domain, Cas12-derived nickase domain) can cleave the strand of a DNA molecule which is being targeted for editing. In such embodiments, the non-targeted strand is not cleaved.

[0290] In some embodiments, a Cas9 nuclease has an inactive (e.g., an inactivated) DNA cleavage domain, that is, the Cas9 is a nickase, referred to as an “nCas9” protein (for “nickase” Cas9). The Cas9 nickase may be a Cas9 protein that is capable of cleaving only one strand of a duplexed nucleic acid molecule (e.g., a duplexed DNA molecule). In some embodiments the Cas9 nickase cleaves the target strand of a duplexed nucleic acid molecule, meaning that the Cas9 nickase cleaves the strand that is base paired to (complementary to) a gRNA (e.g., an sgRNA) that is bound to the Cas9. In some embodiments, a Cas9 nickase comprises a D10A mutation and has a histidine at position 840. In some embodiments the Cas9 nickase cleaves the non-target, non-base-edited strand of a duplexed nucleic acid molecule, meaning that the Cas9 nickase cleaves the strand that is not base paired to a gRNA (e.g., an sgRNA) that is bound to the Cas9. In some embodiments, a Cas9 nickase comprises an H840A mutation and has an aspartic acid residue at position 10, or a corresponding mutation. In some embodiments the Cas9 nickase comprises an amino acid sequence that is at least 60%, at least 65%, at least 70%, at least 75%, at least 80%, at least 85%, at least 90%, at least 95%, at least 96%, at least 97%, at least 98%, at least 99%, or at least 99.5% identical to any one of the Cas9 nickases provided herein. Additional suitable Cas9 nickases will be apparent to those of skill in the art based on this disclosure and knowledge in the field, and are within the scope of this disclosure.

[0291] The amino acid sequence of an exemplary catalytically Cas9 nickase (nCas9) is as follows:

(SEQ ID NO: 234)
MDKKYSIGLAIGTNSVGWAVITDEYKVPSKKFKVLGNTDRHSIKKNLIGA
LLFDSGETAEATRLKRTARRRYTRRKNRICYLQEIFSNEMAKVDDSFFHRL
EESFLVEEDKKHERHPIFGNIVDEVAYHEKYPTIYHLRKKLVDSTDKADLR
LIYLALAHMIKFRGHFLIEGDLNPDNSDVDKLFIQLVQTYNQLFEENPINA
SGVDAKAILSARLSKSRRLENLIAQLPGEKKNGLFGNLIALSLGLTPNFKS
NFDLAEDAKLQLSKDTYDDDLDNLLAQIGDQYADLFLAAKNLSDAILLSDI
LRVNTEITKAPLSASMIKRYDEHHQDLTLLKALVRQQLPEKYKEIFFDQSK
NGYAGYIDGGASQEEFYKFIKPILEKMDGTEELLVKLNREDLLRKQRTFDN
GSIPHQIHLGELHAILRRQEDFYPFLKDNREKIEKILTFRIPYYVGPLARG
NSRFAWMTRKSEETITPWNFEEVVDKGASAQSFIERMTNFDKNLPNEKVLP
KHSLLYEYFTVYNELTKVKYVTEGMRKPAFLSGEQKKAIVDLLFKTNRKVT
VKQLKEDYFKKIECFDSVEISGVEDRFNASLGTYHDLLKIIKDKDFLDNEE
NEDILEDIVLTLTLFEDREMIEERLKTYAHLFDDKVMKQLKRRRYTGWGRL
SRKLINGIRDKQSGKTILDFLKSDGFANRNFMQLIHDDSLTFKEDIQKAQV
SGQGDSLHEHIANLAGSPAIKKGILQTVKVVDELVKVMGRHKPENIVIEMA
RENQTTQKGQKNSRERMKRIEEGIKELGSQILKEHPVENTQLQNEKLYLYY
LQNGRDMYVDQELDINRLSDYDVDHIVPQSFLKDDSIDNKVLTRSDKNRGK
SDNVPSEEVVKKMKNYWRQLLNAKLITQRKFDNLTKAERGGLSELDKAGFI
KRQLVETRQITKHVAQILDSRMNTKYDENDKLIREVKVITLKSKLVSDFRK
DFQFYKVREINNYHHAHDAYLNAVVGTALIKKYPKLESEFVYGDYKVYDVR
KMIAKSEQEIGKATAKYFFYSNIMNFFKTEITLANGEIRKRPLIETNGETG
EIVWDKGRDFATVRKVLSMPQVNIVKKTEVQTGGFSKESILPKRNSDKLIA
RKKDWDPKKYGGFDSPTVAYSVLVVAKVEKGKSKKLKSVKELLGITIMERS
SFEKNPIDFLEAKGYKEVKKDLIIKLPKYSLFELENGRKRMLASAGELQKG
NELALPSKYVNFLYLASHYEKLKGSPEDNEQKQLFVEQHKHYLDEIIEQIS
EFSKRVILADANLDKVLSAYNKHRDKPIREQAENIIHLFTLTNLGAPAAFK
YFDTTIDRKRYTSTKEVLDATLIHQSITGLYETRIDLSQLGGD

[0292] The Cas9 nuclease has two functional endonuclease domains: RuvC and HNH. Cas9 undergoes a conformational change upon target binding that positions the nuclease domains to cleave opposite strands of the target DNA. The end result of Cas9-mediated DNA cleavage is a double-strand break (DSB) within the target DNA (˜3-4 nucleotides upstream of the PAM sequence). The resulting DSB is then repaired by one of two general repair pathways: (1) the efficient but error-prone non-homologous end joining (NHEJ) pathway; or (2) the less efficient but high-fidelity homology directed repair (HDR) pathway.

[0293] The “efficiency” of non-homologous end joining (NHEJ) and/or homology directed repair (HDR) can be calculated by any convenient method. For example, in some embodiments, efficiency can be expressed in terms of percentage of successful HDR. For example, a surveyor nuclease assay can be used to generate cleavage products and the ratio of products to substrate can be used to calculate the percentage. For example, a surveyor nuclease enzyme can be used that directly cleaves DNA containing a newly integrated restriction sequence as the result of successful HDR. More cleaved substrate indicates a greater percent HDR (a greater efficiency of HDR). As an illustrative example, a fraction (percentage) of HDR can be calculated using the following equation [(cleavage products)/(substrate plus cleavage products)] (e.g., (b+c)/(a+b+c), where “a” is the band intensity of DNA substrate and “b” and “c” are the cleavage products).

[0294] In some embodiments, efficiency can be expressed in terms of percentage of successful NHEJ. For example, a T7 endonuclease I assay can be used to generate cleavage products and the ratio of products to substrate can be used to calculate the percentage NHEJ. T7 endonuclease I cleaves mismatched heteroduplex DNA which arises from hybridization of wild-type and mutant DNA strands (NHEJ generates small random insertions or deletions (indels) at the site of the original break). More cleavage indicates a greater percent NHEJ (a greater efficiency of NHEJ). As an illustrative example, a fraction (percentage) of NHEJ can be calculated using the following equation: (1−(1−(b+c)/(a+b+c))_{1/2})×100, where “a” is the band intensity of DNA substrate and “b” and “c” are the cleavage products (Ran et. al., Cell. 2013 Sep. 12; 154(6):1380-9; and Ran et al., Nat Protoc. 2013 November; 8(11): 2281-2308).

[0295] The NHEJ repair pathway is the most active repair mechanism, and it frequently causes small nucleotide insertions or deletions (indels) at the DSB site. The randomness of NHEJ-mediated DSB repair has important practical implications, because a population of cells expressing Cas9 and a gRNA or a guide polynucleotide can result in a diverse array of mutations. In most embodiments, NHEJ gives rise to small indels in the target DNA that result in amino acid deletions, insertions, or frameshift mutations leading to premature stop codons within the open reading frame (ORF) of the targeted gene. The ideal end result is a loss-of-function mutation within the targeted gene.

[0296] While NHEJ-mediated DSB repair often disrupts the open reading frame of the gene, homology directed repair (HDR) can be used to generate specific nucleotide changes ranging from a single nucleotide change to large insertions like the addition of a fluorophore or tag.

[0297] In order to utilize HDR for gene editing, a DNA repair template containing the desired sequence can be delivered into the cell type of interest with the gRNA(s) and Cas9 or Cas9 nickase. The repair template can contain the desired edit as well as additional homologous sequence immediately upstream and downstream of the target (termed left & right homology arms). The length of each homology arm can be dependent on the size of the change being introduced, with larger insertions requiring longer homology arms. The repair template can be a single-stranded oligonucleotide, double-stranded oligonucleotide, or a double-stranded DNA plasmid. The efficiency of HDR is generally low (<10% of modified alleles) even in cells that express Cas9, gRNA and an exogenous repair template. The efficiency of HDR can be enhanced by synchronizing the cells, since HDR takes place during the S and G2 phases of the cell cycle. Chemically or genetically inhibiting genes involved in NHEJ can also increase HDR frequency.

[0298] In some embodiments, Cas9 is a modified Cas9. A given gRNA targeting sequence can have additional sites throughout the genome where partial homology exists. These sites are called off-targets and need to be considered when designing a gRNA. In addition to optimizing gRNA design, CRISPR specificity can also be increased through modifications to Cas9. Cas9 generates double-strand breaks (DSBs) through the combined activity of two nuclease domains, RuvC and HNH. Cas9 nickase, a D10A mutant of SpCas9, retains one nuclease domain and generates a DNA nick rather than a DSB. The nickase system can also be combined with HDR-mediated gene editing for specific gene edits.

### Catalytically Dead Nucleases

[0299] Also provided herein are base editors comprising a polynucleotide programmable nucleotide binding domain which is catalytically dead (i.e., incapable of cleaving a target polynucleotide sequence). Herein the terms “catalytically dead” and “nuclease dead” are used interchangeably to refer to a polynucleotide programmable nucleotide binding domain which has one or more mutations and/or deletions resulting in its inability to cleave a strand of a nucleic acid. In some embodiments, a catalytically dead polynucleotide programmable nucleotide binding domain base editor can lack nuclease activity as a result of specific point mutations in one or more nuclease domains. For example, in the case of a base editor comprising a Cas9 domain, the Cas9 can comprise both a D10A mutation and an H840A mutation. Such mutations inactivate both nuclease domains, thereby resulting in the loss of nuclease activity. In other embodiments, a catalytically dead polynucleotide programmable nucleotide binding domain can comprise one or more deletions of all or a portion of a catalytic domain (e.g., RuvC1 and/or HNH domains). In further embodiments, a catalytically dead polynucleotide programmable nucleotide binding domain comprises a point mutation (e.g., D10A or H840A) as well as a deletion of all or a portion of a nuclease domain. dCas9 domains are known in the art and described, for example, in Qi et “Repurposing CRISPR as an RNA-guided platform for sequence-specific control of gene expression.” Cell. 2013; 152(5):1173-83, the entire contents of which are incorporated herein by reference.

[0300] Additional suitable nuclease-inactive dCas9 domains will be apparent to those of skill in the art based on this disclosure and knowledge in the field, and are within the scope of this disclosure. Such additional exemplary suitable nuclease-inactive Cas9 domains include, but are not limited to, D10A/H840A, D10A/D839A/H840A, and D10A/D839A/H840A/N863A mutant domains (See, e.g., Prashant et al., CAS9 transcriptional activators for target specificity screening and paired nickases for cooperative genome engineering. Nature Biotechnology. 2013; 31(9): 833-838, the entire contents of which are incorporated herein by reference).

[0301] In some embodiments, dCas9 corresponds to, or comprises in part or in whole, a Cas9 amino acid sequence having one or more mutations that inactivate the Cas9 nuclease activity. In some embodiments, the nuclease-inactive dCas9 domain comprises a D10X mutation and a H840X mutation of the amino acid sequence set forth herein, or a corresponding mutation in any of the amino acid sequences provided herein, wherein X is any amino acid change. In some embodiments, the nuclease-inactive dCas9 domain comprises a D10A mutation and a H840A mutation of the amino acid sequence set forth herein, or a corresponding mutation in any of the amino acid sequences provided herein. In some embodiments, a nuclease-inactive Cas9 domain comprises the amino acid sequence set forth in Cloning vector pPlatTET-gRNA2 (Accession No. BAV54124).

[0302] In some embodiments, a variant Cas9 protein can cleave the complementary strand of a guide target sequence but has reduced ability to cleave the non-complementary strand of a double stranded guide target sequence. For example, the variant Cas9 protein can have a mutation (amino acid substitution) that reduces the function of the RuvC domain. As a non-limiting example, in some embodiments, a variant Cas9 protein has a D10A (aspartate to alanine at amino acid position 10) and can therefore cleave the complementary strand of a double stranded guide target sequence but has reduced ability to cleave the non-complementary strand of a double stranded guide target sequence (thus resulting in a single strand break (SSB) instead of a double strand break (DSB) when the variant Cas9 protein cleaves a double stranded target nucleic acid) (see, for example, Jinek et al., Science. 2012 Aug. 17; 337(6096):816-21).

[0303] In some embodiments, a variant Cas9 protein can cleave the non-complementary strand of a double stranded guide target sequence but has reduced ability to cleave the complementary strand of the guide target sequence. For example, the variant Cas9 protein can have a mutation (amino acid substitution) that reduces the function of the HNH domain (RuvC/HNH/RuvC domain motifs). As a non-limiting example, in some embodiments, the variant Cas9 protein has an H840A (histidine to alanine at amino acid position 840) mutation and can therefore cleave the non-complementary strand of the guide target sequence but has reduced ability to cleave the complementary strand of the guide target sequence (thus resulting in a SSB instead of a DSB when the variant Cas9 protein cleaves a double stranded guide target sequence). Such a Cas9 protein has a reduced ability to cleave a guide target sequence (e.g., a single stranded guide target sequence) but retains the ability to bind a guide target sequence (e.g., a single stranded guide target sequence).

[0304] As another non-limiting example, in some embodiments, the variant Cas9 protein harbors W476A and W1126A mutations such that the polypeptide has a reduced ability to cleave a target DNA. Such a Cas9 protein has a reduced ability to cleave a target DNA (e.g., a single stranded target DNA) but retains the ability to bind a target DNA (e.g., a single stranded target DNA).

[0305] As another non-limiting example, in some embodiments, the variant Cas9 protein harbors P475A, W476A, N477A, D1125A, W1126A, and D1127A mutations such that the polypeptide has a reduced ability to cleave a target DNA. Such a Cas9 protein has a reduced ability to cleave a target DNA (e.g., a single stranded target DNA) but retains the ability to bind a target DNA (e.g., a single stranded target DNA).

[0306] As another non-limiting example, in some embodiments, the variant Cas9 protein harbors H840A, W476A, and W1126A, mutations such that the polypeptide has a reduced ability to cleave a target DNA. Such a Cas9 protein has a reduced ability to cleave a target DNA (e.g., a single stranded target DNA) but retains the ability to bind a target DNA (e.g., a single stranded target DNA). As another non-limiting example, in some embodiments, the variant Cas9 protein harbors H840A, D10A, W476A, and W1126A, mutations such that the polypeptide has a reduced ability to cleave a target DNA. Such a Cas9 protein has a reduced ability to cleave a target DNA (e.g., a single stranded target DNA) but retains the ability to bind a target DNA (e.g., a single stranded target DNA). In some embodiments, the variant Cas9 has restored catalytic His residue at position 840 in the Cas9 HNH domain (A840H).

[0307] As another non-limiting example, in some embodiments, the variant Cas9 protein harbors, H840A, P475A, W476A, N477A, D1125A, W1126A, and D1127A mutations such that the polypeptide has a reduced ability to cleave a target DNA. Such a Cas9 protein has a reduced ability to cleave a target DNA (e.g., a single stranded target DNA) but retains the ability to bind a target DNA (e.g., a single stranded target DNA). As another non-limiting example, in some embodiments, the variant Cas9 protein harbors D10A, H840A, P475A, W476A, N477A, D1125A, W1126A, and D1127A mutations such that the polypeptide has a reduced ability to cleave a target DNA. Such a Cas9 protein has a reduced ability to cleave a target DNA (e.g., a single stranded target DNA) but retains the ability to bind a target DNA (e.g., a single stranded target DNA). In some embodiments, when a variant Cas9 protein harbors W476A and W1126A mutations or when the variant Cas9 protein harbors P475A, W476A, N477A, D1125A, W1126A, and D1127A mutations, the variant Cas9 protein does not bind efficiently to a PAM sequence. Thus, in some such embodiments, when such a variant Cas9 protein is used in a method of binding, the method does not require a PAM sequence. In other words, in some embodiments, when such a variant Cas9 protein is used in a method of binding, the method can include a guide RNA, but the method can be performed in the absence of a PAM sequence (and the specificity of binding is therefore provided by the targeting segment of the guide RNA). Other residues can be mutated to achieve the above effects (i.e., inactivate one or the other nuclease portions). As non-limiting examples, residues D10, G12, G17, E762, H840, N854, N863, H982, H983, A984, D986, and/or A987 can be altered (i.e., substituted). Also, mutations other than alanine substitutions are suitable.

[0308] In some embodiments, a variant Cas9 protein that has reduced catalytic activity (e.g., when a Cas9 protein has a D10, G12, G17, E762, H840, N854, N863, H982, H983, A984, D986, and/or a A987 mutation, e.g., D10A, G12A, G17A, E762A, H840A, N854A, N863A, H982A, H983A, A984A, and/or D986A), the variant Cas9 protein can still bind to target DNA in a site-specific manner (because it is still guided to a target DNA sequence by a guide RNA) as long as it retains the ability to interact with the guide RNA.

[0309] In some embodiments, the variant Cas protein can be spCas9, spCas9-VRQR, spCas9-VRER, xCas9 (sp), saCas9, saCas9-KKH, spCas9-MQKSER, spCas9-LRKIQK, or spCas9-LRVSQL.

[0310] In some embodiments, the Cas9 domain is a Cas9 domain from Staphylococcus aureus (SaCas9). In some embodiments, the SaCas9 domain is a nuclease active SaCas9, a nuclease inactive SaCas9 (SaCas9d), or a SaCas9 nickase (SaCas9n). In some embodiments, the SaCas9 comprises a N579A mutation, or a corresponding mutation in any of the amino acid sequences provided in the Sequence Listing submitted herewith.

[0311] In some embodiments, the SaCas9 domain, the SaCas9d domain, or the SaCas9n domain can bind to a nucleic acid sequence having a non-canonical PAM. In some embodiments, the SaCas9 domain, the SaCas9d domain, or the SaCas9n domain can bind to a nucleic acid sequence having a NNGRRT or a NNGRRV PAM sequence. In some embodiments, the SaCas9 domain comprises one or more of a E781X, a N967X, and a R1014X mutation, or a corresponding mutation in any of the amino acid sequences provided herein, wherein X is any amino acid. In some embodiments, the SaCas9 domain comprises one or more of a E781K, a N967K, and a R1014H mutation, or one or more corresponding mutation in any of the amino acid sequences provided herein. In some embodiments, the SaCas9 domain comprises a E781K, a N967K, or a R1014H mutation, or corresponding mutations in any of the amino acid sequences provided herein.

[0312] In some embodiments, one of the Cas9 domains present in the fusion protein may be replaced with a guide nucleotide sequence-programmable DNA-binding protein domain that has no requirements for a PAM sequence. In some embodiments, the Cas9 is an SaCas9. Residue A579 of SaCas9 can be mutated from N579 to yield a SaCas9 nickase. Residues K781, K967, and H1014 can be mutated from E781, N967, and R1014 to yield a SaKKH Cas9.

[0313] In some embodiments, a modified SpCas9 including amino acid substitutions D1135M, S1136Q, G1218K, E1219F, A1322R, D1332A, R1335E, and T1337R (SpCas9-MQKFRAER) and having specificity for the altered PAM 5′-NGC-3′ was used.

[0314] Alternatives to S. pyogenes Cas9 can include RNA-guided endonucleases from the Cpf1 family that display cleavage activity in mammalian cells. CRISPR from Prevotella and Francisella 1 (CRISPR/Cpf1) is a DNA-editing technology analogous to the CRISPR/Cas9 system. Cpf1 is an RNA-guided endonuclease of a class II CRISPR/Cas system. This acquired immune mechanism is found in Prevotella and Francisella bacteria. Cpf1 genes are associated with the CRISPR locus, coding for an endonuclease that use a guide RNA to find and cleave viral DNA. Cpf1 is a smaller and simpler endonuclease than Cas9, overcoming some of the CRISPR/Cas9 system limitations. Unlike Cas9 nucleases, the result of Cpf1-mediated DNA cleavage is a double-strand break with a short 3′ overhang. Cpf1's staggered cleavage pattern can open up the possibility of directional gene transfer, analogous to traditional restriction enzyme cloning, which can increase the efficiency of gene editing. Like the Cas9 variants and orthologues described above, Cpf1 can also expand the number of sites that can be targeted by CRISPR to AT-rich regions or AT-rich genomes that lack the NGG PAM sites favored by SpCas9. The Cpf1 locus contains a mixed alpha/beta domain, a RuvC-I followed by a helical region, a RuvC-II and a zinc finger-like domain. The Cpf1 protein has a RuvC-like endonuclease domain that is similar to the RuvC domain of Cas9.

[0315] Furthermore, Cpf1, unlike Cas9, does not have a HNH endonuclease domain, and the N-terminal of Cpf1 does not have the alpha-helical recognition lobe of Cas9. Cpf1 CRISPR-Cas domain architecture shows that Cpf1 is functionally unique, being classified as Class 2, type V CRISPR system. The Cpf1 loci encode Cas1, Cas2 and Cas4 proteins that are more similar to types I and III than type II systems. Functional Cpf1 does not require the trans-activating CRISPR RNA (tracrRNA), therefore, only CRISPR (crRNA) is required. This benefits genome editing because Cpf1 is not only smaller than Cas9, but also it has a smaller sgRNA molecule (approximately half as many nucleotides as Cas9). The Cpf1-crRNA complex cleaves target DNA or RNA by identification of a protospacer adjacent motif 5′-YTN-3′ or 5′-TTN-3′ in contrast to the G-rich PAM targeted by Cas9. After identification of PAM, Cpf1 introduces a sticky-end-like DNA double-stranded break having an overhang of 4 or 5 nucleotides.

[0316] In some embodiments, the Cas9 is a Cas9 variant having specificity for an altered PAM sequence. In some embodiments, the Additional Cas9 variants and PAM sequences are described in Miller, S. M., et al. Continuous evolution of SpCas9 variants compatible with non-G PAMs, Nat. Biotechnol. (2020), the entirety of which is incorporated herein by reference. in some embodiments, a Cas9 variate have no specific PAM requirements. In some embodiments, a Cas9 variant, e.g. a SpCas9 variant has specificity for a NRNH PAM, wherein R is A or G and H is A, C, or T. In some embodiments, the SpCas9 variant has specificity for a PAM sequence AAA, TAA, CAA, GAA, TAT, GAT, or CAC. In some embodiments, the SpCas9 variant comprises an amino acid substitution at position 1114, 1134, 1135, 1137, 1139, 1151, 1180, 1188, 1211, 1218, 1219, 1221, 1249, 1256, 1264, 1290, 1318, 1317, 1320, 1321, 1323, 1332, 1333, 1335, 1337, or 1339 or a corresponding position thereof. In some embodiments, the SpCas9 variant comprises an amino acid substitution at position 1114, 1135, 1218, 1219, 1221, 1249, 1320, 1321, 1323, 1332, 1333, 1335, or 1337 or a corresponding position thereof. In some embodiments, the SpCas9 variant comprises an amino acid substitution at position 1114, 1134, 1135, 1137, 1139, 1151, 1180, 1188, 1211, 1219, 1221, 1256, 1264, 1290, 1318, 1317, 1320, 1323, 1333 or a corresponding position thereof. In some embodiments, the SpCas9 variant comprises an amino acid substitution at position 1114, 1131, 1135, 1150, 1156, 1180, 1191, 1218, 1219, 1221, 1227, 1249, 1253, 1286, 1293, 1320, 1321, 1332, 1335, 1339 or a corresponding position thereof. In some embodiments, the SpCas9 variant comprises an amino acid substitution at position 1114, 1127, 1135, 1180, 1207, 1219, 1234, 1286, 1301, 1332, 1335, 1337, 1338, 1349 or a corresponding position thereof. Exemplary amino acid substitutions and PAM specificity of SpCas9 variants are shown in Tables 2A-2D.

TABLE 2A
SpCas9 Variants

| | SpCas9 amino acid position | | | | | | | | | | | | |
|---|---|---|---|---|---|---|---|---|---|---|---|---|---|
| | 1114 | 1135 | 1218 | 1219 | 1221 | 1249 | 1320 | 1321 | 1323 | 1332 | 1333 | 1335 | 1337 |
| SpCas9 | R | D | G | E | Q | P | A | P | A | D | R | R | T |
| AAA | | N | | V | H | | | | | | G | | |
| AAA | | N | | V | H | | | | | | G | | |
| AAA | | | | V | | | | | | | G | | |
| TAA | G | N | | V | | | | | | | I | | |
| TAA | | N | | V | | | | | | | I | | A |
| TAA | G | N | | V | | | | | | | I | | A |
| CAA | | | | V | | | | | | | K | | |
| CAA | | N | | V | | | | | | | K | | |
| CAA | | N | | V | | | | | | | K | | |
| GAA | | | | V | H | | V | | | | K | | |
| GAA | | N | | V | | | V | | | | K | | |
| GAA | | | | V | H | | V | | | | K | | |
| TAT | | | S | V | H | S | | S | | | | L | |
| TAT | | | S | V | H | S | | S | | | | L | |
| TAT | | | S | V | H | S | | S | | | | L | |
| GAT | | | | V | | | | | | | I | | |
| GAT | | | | V | | | | | D | | | Q | |
| GAT | | | | V | | | | | D | | | Q | |
| CAC | | | | V | | | | | | N | | Q | N |
| CAC | | N | | V | | | | | | | | Q | N |
| CAC | | | | V | | | | | | N | | Q | N |

TABLE 2B

| | SpCas9 amino acid position 3 | | | | | | | | | | | | | | | | | | |
|---|---|---|---|---|---|---|---|---|---|---|---|---|---|---|---|---|---|---|---|
| | 1114 | 1134 | 1135 | 1137 | 1139 | 1151 | 1180 | 1188 | 1211 | 1219 | 1221 | 1256 | 1264 | 1290 | 1318 | 1317 | 1320 | 1323 | 1333 |
| SpCas9 | R | F | D | P | V | K | D | K | K | E | Q | Q | H | V | L | N | A | A | R |
| GAA | | | | | | | | | | V | H | | | | | | V | | Y |
| GAA | | | N | S | | | | | | V | | | | | | | V | D | Y |
| GAA | | | N | | | | | | | V | H | | Y | | | | V | | K |
| CAA | | | N | | | | | | | V | H | | Y | | | | V | | K |
| CAA | G | | N | S | | | | | | V | H | | Y | | | | V | | K |
| CAA | | | N | | | | | R | | V | H | | | | | | V | | K |
| CAA | | | N | | | | G | | R | V | H | | Y | | | | V | | K |
| CAA | | | N | | | | | | | V | H | | Y | | | | V | | K |
| AAA | | | N | | | | G | | | V | H | R | Y | | | | V | D | K |
| CAA | G | | N | | | | G | | | V | H | | Y | | | | V | D | K |
| CAA | | L | N | | | | G | | | V | H | | Y | | | T | V | D | K |
| TAA | G | | N | | | | G | | | V | H | | Y | G | S | | V | D | K |
| TAA | G | | N | | | E | G | | | V | H | | Y | | S | | V | | K |
| TAA | G | | N | | | | G | | | V | H | | Y | | S | | V | D | K |
| TAA | G | | N | | | | G | | R | V | H | | | | | | V | | K |
| TAA | | | N | | | | G | | R | V | H | | Y | | | | V | | K |
| TAA | G | | N | | A | | G | | | V | H | | | | | | V | | K |
| TAA | G | | N | | | | | | | V | H | | | | | | V | | K |

TABLE 2C

| | SpCas9 amino acid position | | | | | | | | | | |
|---|---|---|---|---|---|---|---|---|---|---|---|
| | 1114 | 1131 | 1135 | 1150 | 1156 | 1180 | 1191 | 1218 | 1219 | 1221 | 1227 |
| SpCas9 | R | Y | D | E | K | D | K | G | E | Q | A |
| SacB.TAT | | | N | | | | N | | V | H | |
| SacB.TAT | | | N | | | | | S | V | H | |
| AAT | | | N | | | | | S | V | H | V |
| TAT | G | | N | | | G | | S | V | H | |
| TAT | G | | N | | | G | | S | V | H | |
| TAT | G | C | N | | | G | | S | V | H | |
| TAT | G | C | N | | | G | | S | V | H | |
| TAT | G | C | N | | | G | | S | V | H | |
| TAT | G | C | N | | E | G | | S | V | H | |
| TAT | G | C | N | V | | G | | S | V | H | |
| TAT | | C | N | | | G | | S | V | H | |
| TAT | G | C | N | | | G | | S | V | H | |

| | SpCas9 amino acid position | | | | | | | | | |
|---|---|---|---|---|---|---|---|---|---|---|
| | | 1249 | 1253 | 1286 | 1293 | 1320 | 1321 | 1332 | 1335 | 1339 |
| SpCas9 | | P | E | N | A | A | P | D | R | T |
| SacB.TAT | | | | | | V | S | | L | |
| SacB.TAT | | S | | | | | S | G | L | |
| AAT | | S | | K | T | | S | G | L | I |
| TAT | | S | K | | | | S | G | L | |
| TAT | | S | | | | | S | G | L | |
| TAT | | S | | | | | S | G | L | |
| TAT | | S | | | | | S | G | L | |
| TAT | | S | | | | | S | G | L | |
| TAT | | S | | | | | S | G | L | |
| TAT | | S | | | | | S | G | L | |
| TAT | | S | | | | | S | G | L | |
| TAT | | S | | | | | S | G | L | |

TABLE 2D

| | SpCas9 amino acid position | | | | | | | | | | | | | |
|---|---|---|---|---|---|---|---|---|---|---|---|---|---|---|
| | 1114 | 1127 | 1135 | 1180 | 1207 | 1219 | 1234 | 1286 | 1301 | 1332 | 1335 | 1337 | 1338 | 1349 |
| SpCas9 | R | D | D | D | E | E | N | N | P | D | R | T | S | H |
| SacB.CAC | | | N | | | V | | | | N | Q | N | | |
| AAC | G | | N | | | V | | | | N | Q | N | | |
| AAC | G | | N | | | V | | | | N | Q | N | | |
| TAC | G | | N | | | V | | | | N | Q | N | | |
| TAC | G | | N | | | V | | H | | N | Q | N | | |
| TAC | G | | N | | G | V | D | H | | N | Q | N | | |
| TAC | G | | N | | | V | | | | N | Q | N | | |
| TAC | G | G | N | E | | V | | H | | N | Q | N | | |
| TAC | G | | N | | | V | | H | | N | Q | N | | |
| TAC | G | | N | | | V | | | | N | Q | N | T | R |

[0317] In some embodiments, the nucleic acid programmable DNA binding protein (napDNAbp) is a single effector of a microbial CRISPR-Cas system. Single effectors of microbial CRISPR-Cas systems include, without limitation, Cas9, Cpf1, Cas12b/C2c1, and Cas12c/C2c3. Typically, microbial CRISPR-Cas systems are divided into Class 1 and Class 2 systems. Class 1 systems have multisubunit effector complexes, while Class 2 systems have a single protein effector. For example, Cas9 and Cpf1 are Class 2 effectors. In addition to Cas9 and Cpf1, three distinct Class 2 CRISPR-Cas systems (Cas12b/C2c1, and Cas12c/C2c3) have been described by Shmakov et al., “Discovery and Functional Characterization of Diverse Class 2 CRISPR Cas Systems”, Mol. Cell, 2015 Nov. 5; 60(3): 385-397, the entire contents of which is hereby incorporated by reference. Effectors of two of the systems, Cas12b/C2c1, and Cas12c/C2c3, contain RuvC-like endonuclease domains related to Cpf1. A third system contains an effector with two predicated HEPN RNase domains. Production of mature CRISPR RNA is tracrRNA-independent, unlike production of CRISPR RNA by Cas12b/C2c1. Cas12b/C2c1 depends on both CRISPR RNA and tracrRNA for DNA cleavage.

[0318] In some embodiments, the napDNAbp is a circular permutant (e.g., SEQ ID NO: 257).

[0319] The crystal structure of Alicyclobacillus acidoterrestris Cas12b/C2c1 (AacC2c1) has been reported in complex with a chimeric single-molecule guide RNA (sgRNA). See e.g., Liu et “C2c1-sgRNA Complex Structure Reveals RNA-Guided DNA Cleavage Mechanism”, Mol. Cell, 2017 Jan. 19; 65(2):310-322, the entire contents of which are hereby incorporated by reference. The crystal structure has also been reported in Alicyclobacillus acidoterrestris C2c1 bound to target DNAs as ternary complexes. See e.g., Yang et al., “PAM-dependent Target DNA Recognition and Cleavage by C2C1 CRISPR-Cas endonuclease”, Cell, 2016 Dec. 15; 167(7):1814-1828, the entire contents of which are hereby incorporated by reference. Catalytically competent conformations of AacC2c1, both with target and non-target DNA strands, have been captured independently positioned within a single RuvC catalytic pocket, with Cas12b/C2c1-mediated cleavage resulting in a staggered seven-nucleotide break of target DNA. Structural comparisons between Cas12b/C2c1 ternary complexes and previously identified Cas9 and Cpf1 counterparts demonstrate the diversity of mechanisms used by CRISPR-Cas9 systems.

[0320] In some embodiments, the nucleic acid programmable DNA binding protein (napDNAbp) of any of the fusion proteins provided herein may be a Cas12b/C2c1, or a Cas12c/C2c3 protein. In some embodiments, the napDNAbp is a Cas12b/C2c1 protein. In some embodiments, the napDNAbp is a Cas12c/C2c3 protein. In some embodiments, the napDNAbp comprises an amino acid sequence that is at least 85%, at least 90%, at least 91%, at least 92%, at least 93%, at least 94%, at least 95%, at least 96%, at least 97%, at least 98%, at least 99%, or at ease 99.5% identical to a naturally-occurring Cas12b/C2c1 or Cas12c/C2c3 protein. In some embodiments, the napDNAbp is a naturally-occurring Cas12b/C2c1 or Cas12c/C2c3 protein. In some embodiments, the napDNAbp comprises an amino acid sequence that is at least 85%, at least 90%, at least 91%, at least 92%, at least 93%, at least 94%, at least 95%, at least 96%, at least 97%, at least 98%, at least 99%, or at ease 99.5% identical to any one of the napDNAbp sequences provided herein. It should be appreciated that Cas12b/C2c1 or Cas12c/C2c3 from other bacterial species may also be used in accordance with the present disclosure.

[0321] In some embodiments, a napDNAbp refers to Cas12c. In some embodiments, the Cas12c protein is a Cas12c1 (SEQ ID NO: 266) or a variant of Cas12c1. In some embodiments, the Cas12 protein is a Cas12c2 (SEQ ID NO: 267) or a variant of Cas12c2. In some embodiments, the Cas12 protein is a Cas12c protein from Oleiphilus sp. H10009 OspCas12c; SEQ ID NO: 268) or a variant of OspCas12c. These Cas12c molecules have been described in Yan et al., “Functionally Diverse Type V CRISPR-Cas Systems,” Science, 2019 Jan. 4; 363: 88-91; the entire contents of which is hereby incorporated by reference. In some embodiments, the napDNAbp comprises an amino acid sequence that is at least 85%, at least 90%, at least 91%, at least 92%, at least 93%, at least 94%, at least 95%, at least 96%, at least 97%, at least 98%, at least 99%, or at least 99.5% identical to a naturally-occurring Cas12c1, Cas12c2, or OspCas12c protein. In some embodiments, the napDNAbp is a naturally-occurring Cas12c1, Cas12c2, or OspCas12c protein. In some embodiments, the napDNAbp comprises an amino acid sequence that is at least 85%, at least 90%, at least 91%, at least 92%, at least 93%, at least 94%, at least 95%, at least 96%, at least 97%, at least 98%, at least 99%, or at ease 99.5% identical to any Cas12c1, Cas12c2, or OspCas12c protein described herein. It should be appreciated that Cas12c1, Cas12c2, or OspCas12c from other bacterial species may also be used in accordance with the present disclosure.

[0322] In some embodiments, a napDNAbp refers to Cas12g, Cas12h, or Cas12i, which have been described in, for example, Yan et al., “Functionally Diverse Type V CRISPR-Cas Systems,” Science, 2019 Jan. 4; 363: 88-91; the entire contents of each is hereby incorporated by reference. Exemplary Cas12g, Cas12h, and Cas12i polypeptide sequences are provided in the Sequence Listing as SEQ ID NOs: 269-272. By aggregating more than 10 terabytes of sequence data, new classifications of Type V Cas proteins were identified that showed weak similarity to previously characterized Class V protein, including Cas12g, Cas12h, and Cas12i. In some embodiments, the Cas12 protein is a Cas12g or a variant of Cas12g. In some embodiments, the Cas12 protein is a Cas12h or a variant of Cas12h. In some embodiments, the Cas12 protein is a Cas12i or a variant of Cas12i. It should be appreciated that other RNA-guided DNA binding proteins may be used as a napDNAbp, and are within the scope of this disclosure. In some embodiments, the napDNAbp comprises an amino acid sequence that is at least 85%, at least 90%, at least 91%, at least 92%, at least 93%, at least 94%, at least 95%, at least 96%, at least 97%, at least 98%, at least 99%, or at least 99.5% identical to a naturally-occurring Cas12g, Cas12h, or Cas12i protein. In some embodiments, the napDNAbp is a naturally-occurring Cas12g, Cas12h, or Cas12i protein. In some embodiments, the napDNAbp comprises an amino acid sequence that is at least 85%, at least 90%, at least 91%, at least 92%, at least 93%, at least 94%, at least 95%, at least 96%, at least 97%, at least 98%, at least 99%, or at ease 99.5% identical to any Cas12g, Cas12h, or Cas12i protein described herein. It should be appreciated that Cas12g, Cas12h, or Cas12i from other bacterial species may also be used in accordance with the present disclosure. In some embodiments, the Cas12i is a Cas12i1 or a Cas12i2.

[0323] In some embodiments, the nucleic acid programmable DNA binding protein (napDNAbp) of any of the fusion proteins provided herein may be a Cas12j/Casϕ protein. Cas12j/Casϕ is described in Pausch et al., “CRISPR-Casϕ from huge phages is a hypercompact genome editor,” Science, 17 Jul. 2020, Vol. 369, Issue 6501, pp. 333-337, which is incorporated herein by reference in its entirety. In some embodiments, the napDNAbp comprises an amino acid sequence that is at least 85%, at least 90%, at least 91%, at least 92%, at least 93%, at least 94%, at least 95%, at least 96%, at least 97%, at least 98%, at least 99%, or at ease 99.5% identical to a naturally-occurring Cas12j/Casϕ protein. In some embodiments, the napDNAbp is a naturally-occurring Cas12j/Casϕ protein. In some embodiments, the napDNAbp is a nuclease inactive (“dead”) Cas12j/Casϕ protein. It should be appreciated that Cas12j/Casϕ from other species may also be used in accordance with the present disclosure.

Fusion Proteins with Internal Insertion

[0324] Provided herein are fusion proteins comprising a heterologous polypeptide fused to a nucleic acid programmable nucleic acid binding protein, for example, a napDNAbp. A heterologous polypeptide can be a polypeptide that is not found in the native or wild-type napDNAbp polypeptide sequence. The heterologous polypeptide can be fused to the napDNAbp at a C-terminal end of the napDNAbp, an N-terminal end of the napDNAbp, or inserted at an internal location of the napDNAbpln some embodiments, the heterologous polypeptide is a deaminase (e.g., cytidine of adenosine deaminase) or a functional fragment thereof. For example, a fusion protein can comprise a deaminase flanked by an N-terminal fragment and a C-terminal fragment of a Cas9 or Cas12 (e.g., Cas12b/C2c1), polypeptide. In some embodiments, the cytidine deaminase is an APOBEC deaminase (e.g., APOBEC1). In some embodiments, the adenosine deaminase is a TadA (e.g., TadA*7.10 or TadA*8). In some embodiments, the TadA is a TadA*8 or a TadA*9. TadA sequences (e.g., TadA7.10 or TadA*8) as described herein are suitable deaminases for the above-described fusion proteins.

[0325] In some embodiments, the fusion protein comprises the structure:
[0326] NH2-[N-terminal fragment of a napDNAbp]-[deaminase]-[C-terminal fragment of a napDNAbp]-COOH;
[0327] NH2-[N-terminal fragment of a Cas9]-[adenosine deaminase]-[C-terminal fragment of a Cas9]-COOH;
[0328] NH2-[N-terminal fragment of a Cas12]-[adenosine deaminase]-[C-terminal fragment of a Cas12]-COOH;
[0329] NH2-[N-terminal fragment of a Cas9]-[cytidine deaminase]-[C-terminal fragment of a Cas9]-COOH;
[0330] NH2-[N-terminal fragment of a Cas12]-[cytidine deaminase]-[C-terminal fragment of a Cas12]-COOH;
   wherein each instance of “]-[” is an optional linker.

[0331] The deaminase can be a circular permutant deaminase. For example, the deaminase can be a circular permutant adenosine deaminase. In some embodiments, the deaminase is a circular permutant TadA, circularly permutated at amino acid residue 116, 136, or 65 as numbered in the TadA reference sequence.

[0332] The fusion protein can comprise more than one deaminase. The fusion protein can comprise, for example, 1, 2, 3, 4, 5 or more deaminases. In some embodiments, the fusion protein comprises one or two deaminase. The two or more deaminases in a fusion protein can be an adenosine deaminase, a cytidine deaminase, or a combination thereof. The two or more deaminases can be homodimers or heterodimers. The two or more deaminases can be inserted in tandem in the napDNAbp. In some embodiments, the two or more deaminases may not be in tandem in the napDNAbp.

[0333] In some embodiments, the napDNAbp in the fusion protein is a Cas9 polypeptide or a fragment thereof. The Cas9 polypeptide can be a variant Cas9 polypeptide. In some embodiments, the Cas9 polypeptide is a Cas9 nickase (nCas9) polypeptide or a fragment thereof. In some embodiments, the Cas9 polypeptide is a nuclease dead Cas9 (dCas9) polypeptide or a fragment thereof. The Cas9 polypeptide in a fusion protein can be a full-length Cas9 polypeptide. In some cases, the Cas9 polypeptide in a fusion protein may not be a full length Cas9 polypeptide. The Cas9 polypeptide can be truncated, for example, at a N-terminal or C-terminal end relative to a naturally-occurring Cas9 protein. The Cas9 polypeptide can be a circularly permuted Cas9 protein. The Cas9 polypeptide can be a fragment, a portion, or a domain of a Cas9 polypeptide, that is still capable of binding the target polynucleotide and a guide nucleic acid sequence.

[0334] In some embodiments, the Cas9 polypeptide is a Streptococcus pyogenes Cas9 (SpCas9), Staphylococcus aureus Cas9 (SaCas9), Streptococcus thermophilus 1 Cas9 (St1Cas9), or fragments or variants of any of the Cas9 polypeptides described herein.

[0335] In some embodiments, the fusion protein comprises an adenosine deaminase domain and a cytidine deaminase domain inserted within a Cas9. In some embodiments, an adenosine deaminase is fused within a Cas9 and a cytidine deaminase is fused to the C-terminus. In some embodiments, an adenosine deaminase is fused within Cas9 and a cytidine deaminase fused to the N-terminus. In some embodiments, a cytidine deaminase is fused within Cas9 and an adenosine deaminase is fused to the C-terminus. In some embodiments, a cytidine deaminase is fused within Cas9 and an adenosine deaminase fused to the N-terminus.

[0336] Exemplary structures of a fusion protein with an adenosine deaminase and a cytidine deaminase and a Cas9 are provided as follows:
[0337] NH2-[Cas9(adenosine deaminase)]-[cytidine deaminase]-COOH;
[0338] NH2-[cytidine deaminase]-[Cas9(adenosine deaminase)]-COOH;
[0339] NH2-[Cas9(cytidine deaminase)]-[adenosine deaminase]-COOH; or
[0340] NH2-[adenosine deaminase]-[Cas9(cytidine deaminase)]-COOH.

[0341] In some embodiments, the “-” used in the general architecture above indicates the presence of an optional linker.

[0342] In various embodiments, the catalytic domain has DNA modifying activity (e.g., deaminase activity), such as adenosine deaminase activity. In some embodiments, the adenosine deaminase is a TadA (e.g., TadA*7.10). In some embodiments, the TadA is a TadA*8. In some embodiments, a TadA*8 is fused within Cas9 and a cytidine deaminase is fused to the C-terminus. In some embodiments, a TadA*8 is fused within Cas9 and a cytidine deaminase fused to the N-terminus. In some embodiments, a cytidine deaminase is fused within Cas9 and a TadA*8 is fused to the C-terminus. In some embodiments, a cytidine deaminase is fused within Cas9 and a TadA*8 fused to the N-terminus. Exemplary structures of a fusion protein with a TadA*8 and a cytidine deaminase and a Cas9 are provided as follows:
[0343] NH2-[Cas9(TadA*8)]-[cytidine deaminase]-COOH;
[0344] NH2-[cytidine deaminase]-[Cas9(TadA*8)]-COOH;
[0345] NH2-[Cas9(cytidine deaminase)]-[TadA*8]-COOH; or
[0346] NH2-[TadA*8]-[Cas9(cytidine deaminase)]-COOH.

[0347] In some embodiments, the “-” used in the general architecture above indicates the presence of an optional linker.

[0348] The heterologous polypeptide (e.g., deaminase) can be inserted in the napDNAbp (e.g., Cas9 or Cas12 (e.g., Cas12b/C2c1)) at a suitable location, for example, such that the napDNAbp retains its ability to bind the target polynucleotide and a guide nucleic acid. A deaminase (e.g., adenosine deaminase, cytidine deaminase, or adenosine deaminase and cytidine deaminase) can be inserted into a napDNAbp without compromising function of the deaminase (e.g., base editing activity) or the napDNAbp (e.g., ability to bind to target nucleic acid and guide nucleic acid). A deaminase (e.g., adenosine deaminase, cytidine deaminase, or adenosine deaminase and cytidine deaminase) can be inserted in the napDNAbp at, for example, a disordered region or a region comprising a high temperature factor or B-factor as shown by crystallographic studies. Regions of a protein that are less ordered, disordered, or unstructured, for example solvent exposed regions and loops, can be used for insertion without compromising structure or function. A deaminase (e.g., adenosine deaminase, cytidine deaminase, or adenosine deaminase and cytidine deaminase) can be inserted in the napDNAbp in a flexible loop region or a solvent-exposed region. In some embodiments, the deaminase (e.g., adenosine deaminase, cytidine deaminase, or adenosine deaminase and cytidine deaminase) is inserted in a flexible loop of the Cas9 or the Cas12b/C2c1 polypeptide.

[0349] In some embodiments, the insertion location of a deaminase (e.g., adenosine deaminase, cytidine deaminase, or adenosine deaminase and cytidine deaminase) is determined by B-factor analysis of the crystal structure of Cas9 polypeptide. In some embodiments, the deaminase (e.g., adenosine deaminase, cytidine deaminase, or adenosine deaminase and cytidine deaminase) is inserted in regions of the Cas9 polypeptide comprising higher than average B-factors (e.g., higher B factors compared to the total protein or the protein domain comprising the disordered region). B-factor or temperature factor can indicate the fluctuation of atoms from their average position (for example, as a result of temperature-dependent atomic vibrations or static disorder in a crystal lattice). A high B-factor (e.g., higher than average B-factor) for backbone atoms can be indicative of a region with relatively high local mobility. Such a region can be used for inserting a deaminase without compromising structure or function. A deaminase (e.g., adenosine deaminase, cytidine deaminase, or adenosine deaminase and cytidine deaminase) can be inserted at a location with a residue having a Ca atom with a B-factor that is 50%, 60%, 70%, 80%, 90%, 100%, 110%, 120%, 130%, 140%, 150%, 160%, 170%, 180%, 190%, 200%, or greater than 200% more than the average B-factor for the total protein. A deaminase (e.g., adenosine deaminase, cytidine deaminase, or adenosine deaminase and cytidine deaminase) can be inserted at a location with a residue having a Ca atom with a B-factor that is 50%, 60%, 70%, 80%, 90%, 100%, 110%, 120%, 130%, 140%, 150%, 160%, 170%, 180%, 190%, 200% or greater than 200% more than the average B-factor for a Cas9 protein domain comprising the residue. Cas9 polypeptide positions comprising a higher than average B-factor can include, for example, residues 768, 792, 1052, 1015, 1022, 1026, 1029, 1067, 1040, 1054, 1068, 1246, 1247, and 1248 as numbered in the above Cas9 reference sequence. Cas9 polypeptide regions comprising a higher than average B-factor can include, for example, residues 792-872, 792-906, and 2-791 as numbered in the above Cas9 reference sequence.

[0350] A heterologous polypeptide (e.g., deaminase) can be inserted in the napDNAbp at an amino acid residue selected from the group consisting of: 768, 791, 792, 1015, 1016, 1022, 1023, 1026, 1029, 1040, 1052, 1054, 1067, 1068, 1069, 1246, 1247, and 1248 as numbered in the above Cas9 reference sequence, or a corresponding amino acid residue in another Cas9 polypeptide. In some embodiments, the heterologous polypeptide is inserted between amino acid positions 768-769, 791-792, 792-793, 1015-1016, 1022-1023, 1026-1027, 1029-1030, 1040-1041, 1052-1053, 1054-1055, 1067-1068, 1068-1069, 1247-1248, or 1248-1249 as numbered in the above Cas9 reference sequence or corresponding amino acid positions thereof. In some embodiments, the heterologous polypeptide is inserted between amino acid positions 769-770, 792-793, 793-794, 1016-1017, 1023-1024, 1027-1028, 1030-1031, 1041-1042, 1053-1054, 1055-1056, 1068-1069, 1069-1070, 1248-1249, or 1249-1250 as numbered in the above Cas9 reference sequence or corresponding amino acid positions thereof. In some embodiments, the heterologous polypeptide replaces an amino acid residue selected from the group consisting of: 768, 791, 792, 1015, 1016, 1022, 1023, 1026, 1029, 1040, 1052, 1054, 1067, 1068, 1069, 1246, 1247, and 1248 as numbered in the above Cas9 reference sequence, or a corresponding amino acid residue in another Cas9 polypeptide. It should be understood that the reference to the above Cas9 reference sequence with respect to insertion positions is for illustrative purposes. The insertions as discussed herein are not limited to the Cas9 polypeptide sequence of the above Cas9 reference sequence, but include insertion at corresponding locations in variant Cas9 polypeptides, for example a Cas9 nickase (nCas9), nuclease dead Cas9 (dCas9), a Cas9 variant lacking a nuclease domain, a truncated Cas9, or a Cas9 domain lacking partial or complete HNH domain.

[0351] A heterologous polypeptide (e.g., deaminase) can be inserted in the napDNAbp at an amino acid residue selected from the group consisting of: 768, 792, 1022, 1026, 1040, 1068, and 1247 as numbered in the above Cas9 reference sequence, or a corresponding amino acid residue in another Cas9 polypeptide. In some embodiments, the heterologous polypeptide is inserted between amino acid positions 768-769, 792-793, 1022-1023, 1026-1027, 1029-1030, 1040-1041, 1068-1069, or 1247-1248 as numbered in the above Cas9 reference sequence or corresponding amino acid positions thereof. In some embodiments, the heterologous polypeptide is inserted between amino acid positions 769-770, 793-794, 1023-1024, 1027-1028, 1030-1031, 1041-1042, 1069-1070, or 1248-1249 as numbered in the above Cas9 reference sequence or corresponding amino acid positions thereof. In some embodiments, the heterologous polypeptide replaces an amino acid residue selected from the group consisting of: 768, 792, 1022, 1026, 1040, 1068, and 1247 as numbered in the above Cas9 reference sequence, or a corresponding amino acid residue in another Cas9 polypeptide.

[0352] A heterologous polypeptide (e.g., deaminase) can be inserted in the napDNAbp at an amino acid residue as described herein, or a corresponding amino acid residue in another Cas9 polypeptide. In an embodiment, a heterologous polypeptide (e.g., deaminase) can be inserted in the napDNAbp at an amino acid residue selected from the group consisting of: 1002, 1003, 1025, 1052-1056, 1242-1247, 1061-1077, 943-947, 686-691, 569-578, 530-539, and 1060-1077 as numbered in the above Cas9 reference sequence, or a corresponding amino acid residue in another Cas9 polypeptide. The deaminase (e.g., adenosine deaminase, cytidine deaminase, or adenosine deaminase and cytidine deaminase) can be inserted at the N-terminus or the C-terminus of the residue or replace the residue. In some embodiments, the deaminase (e.g., adenosine deaminase, cytidine deaminase, or adenosine deaminase and cytidine deaminase) is inserted at the C-terminus of the residue.

[0353] In some embodiments, an adenosine deaminase (e.g., TadA) is inserted at an amino acid residue selected from the group consisting of: 1015, 1022, 1029, 1040, 1068, 1247, 1054, 1026, 768, 1067, 1248, 1052, and 1246 as numbered in the above Cas9 reference sequence, or a corresponding amino acid residue in another Cas9 polypeptide. In some embodiments, an adenosine deaminase (e.g., TadA) is inserted in place of residues 792-872, 792-906, or 2-791 as numbered in the above Cas9 reference sequence, or a corresponding amino acid residue in another Cas9 polypeptide. In some embodiments, the adenosine deaminase is inserted at the N-terminus of an amino acid selected from the group consisting of: 1015, 1022, 1029, 1040, 1068, 1247, 1054, 1026, 768, 1067, 1248, 1052, and 1246 as numbered in the above Cas9 reference sequence, or a corresponding amino acid residue in another Cas9 polypeptide. In some embodiments, the adenosine deaminase is inserted at the C-terminus of an amino acid selected from the group consisting of: 1015, 1022, 1029, 1040, 1068, 1247, 1054, 1026, 768, 1067, 1248, 1052, and 1246 as numbered in the above Cas9 reference sequence, or a corresponding amino acid residue in another Cas9 polypeptide. In some embodiments, the adenosine deaminase is inserted to replace an amino acid selected from the group consisting of: 1015, 1022, 1029, 1040, 1068, 1247, 1054, 1026, 768, 1067, 1248, 1052, and 1246 as numbered in the above Cas9 reference sequence, or a corresponding amino acid residue in another Cas9 polypeptide.

[0354] In some embodiments, a cytidine deaminase (e.g., APOBEC1) is inserted at an amino acid residue selected from the group consisting of: 1016, 1023, 1029, 1040, 1069, and 1247 as numbered in the above Cas9 reference sequence, or a corresponding amino acid residue in another Cas9 polypeptide. In some embodiments, the cytidine deaminase is inserted at the N-terminus of an amino acid selected from the group consisting of: 1016, 1023, 1029, 1040, 1069, and 1247 as numbered in the above Cas9 reference sequence, or a corresponding amino acid residue in another Cas9 polypeptide. In some embodiments, the cytidine deaminase is inserted at the C-terminus of an amino acid selected from the group consisting of: 1016, 1023, 1029, 1040, 1069, and 1247 as numbered in the above Cas9 reference sequence, or a corresponding amino acid residue in another Cas9 polypeptide. In some embodiments, the cytidine deaminase is inserted to replace an amino acid selected from the group consisting of: 1016, 1023, 1029, 1040, 1069, and 1247 as numbered in the above Cas9 reference sequence, or a corresponding amino acid residue in another Cas9 polypeptide.

[0355] In some embodiments, the deaminase (e.g., adenosine deaminase, cytidine deaminase, or adenosine deaminase and cytidine deaminase) is inserted at amino acid residue 768 as numbered in the above Cas9 reference sequence, or a corresponding amino acid residue in another Cas9 polypeptide. In some embodiments, the deaminase (e.g., adenosine deaminase, cytidine deaminase, or adenosine deaminase and cytidine deaminase) is inserted at the N-terminus of amino acid residue 768 as numbered in the above Cas9 reference sequence, or a corresponding amino acid residue in another Cas9 polypeptide. In some embodiments, the deaminase (e.g., adenosine deaminase, cytidine deaminase, or adenosine deaminase and cytidine deaminase) is inserted at the C-terminus of amino acid residue 768 as numbered in the above Cas9 reference sequence, or a corresponding amino acid residue in another Cas9 polypeptide. In some embodiments, the deaminase (e.g., adenosine deaminase, cytidine deaminase, or adenosine deaminase and cytidine deaminase) is inserted to replace amino acid residue 768 as numbered in the above Cas9 reference sequence, or a corresponding amino acid residue in another Cas9 polypeptide.

[0356] In some embodiments, the deaminase (e.g., adenosine deaminase, cytidine deaminase, or adenosine deaminase and cytidine deaminase) is inserted at amino acid residue 791 or is inserted at amino acid residue 792, as numbered in the above Cas9 reference sequence, or a corresponding amino acid residue in another Cas9 polypeptide. In some embodiments, the deaminase (e.g., adenosine deaminase, cytidine deaminase, or adenosine deaminase and cytidine deaminase) is inserted at the N-terminus of amino acid residue 791 or is inserted at the N-terminus of amino acid 792, as numbered in the above Cas9 reference sequence, or a corresponding amino acid residue in another Cas9 polypeptide. In some embodiments, the deaminase (e.g., adenosine deaminase, cytidine deaminase, or adenosine deaminase and cytidine deaminase) is inserted at the C-terminus of amino acid 791 or is inserted at the N-terminus of amino acid 792, as numbered in the above Cas9 reference sequence, or a corresponding amino acid residue in another Cas9 polypeptide. In some embodiments, the deaminase (e.g., adenosine deaminase, cytidine deaminase, or adenosine deaminase and cytidine deaminase) is inserted to replace amino acid 791, or is inserted to replace amino acid 792, as numbered in the above Cas9 reference sequence, or a corresponding amino acid residue in another Cas9 polypeptide.

[0357] In some embodiments, the deaminase (e.g., adenosine deaminase, cytidine deaminase, or adenosine deaminase and cytidine deaminase) is inserted at amino acid residue 1016 as numbered in the above Cas9 reference sequence, or a corresponding amino acid residue in another Cas9 polypeptide. In some embodiments, the deaminase (e.g., adenosine deaminase, cytidine deaminase, or adenosine deaminase and cytidine deaminase) is inserted at the N-terminus of amino acid residue 1016 as numbered in the above Cas9 reference sequence, or a corresponding amino acid residue in another Cas9 polypeptide. In some embodiments, the deaminase (e.g., adenosine deaminase, cytidine deaminase, or adenosine deaminase and cytidine deaminase) is inserted at the C-terminus of amino acid residue 1016 as numbered in the above Cas9 reference sequence, or a corresponding amino acid residue in another Cas9 polypeptide. In some embodiments, the deaminase (e.g., adenosine deaminase, cytidine deaminase, or adenosine deaminase and cytidine deaminase) is inserted to replace amino acid residue 1016 as numbered in the above Cas9 reference sequence, or a corresponding amino acid residue in another Cas9 polypeptide.

[0358] In some embodiments, the deaminase (e.g., adenosine deaminase, cytidine deaminase, or adenosine deaminase and cytidine deaminase) is inserted at amino acid residue 1022, or is inserted at amino acid residue 1023, as numbered in the above Cas9 reference sequence, or a corresponding amino acid residue in another Cas9 polypeptide. In some embodiments, the deaminase (e.g., adenosine deaminase, cytidine deaminase, or adenosine deaminase and cytidine deaminase) is inserted at the N-terminus of amino acid residue 1022 or is inserted at the N-terminus of amino acid residue 1023, as numbered in the above Cas9 reference sequence, or a corresponding amino acid residue in another Cas9 polypeptide. In some embodiments, the deaminase (e.g., adenosine deaminase, cytidine deaminase, or adenosine deaminase and cytidine deaminase) is inserted at the C-terminus of amino acid residue 1022 or is inserted at the C-terminus of amino acid residue 1023, as numbered in the above Cas9 reference sequence, or a corresponding amino acid residue in another Cas9 polypeptide. In some embodiments, the deaminase (e.g., adenosine deaminase, cytidine deaminase, or adenosine deaminase and cytidine deaminase) is inserted to replace amino acid residue 1022, or is inserted to replace amino acid residue 1023, as numbered in the above Cas9 reference sequence, or a corresponding amino acid residue in another Cas9 polypeptide.

[0359] In some embodiments, the deaminase (e.g., adenosine deaminase, cytidine deaminase, or adenosine deaminase and cytidine deaminase) is inserted at amino acid residue 1026, or is inserted at amino acid residue 1029, as numbered in the above Cas9 reference sequence, or a corresponding amino acid residue in another Cas9 polypeptide. In some embodiments, the deaminase (e.g., adenosine deaminase, cytidine deaminase, or adenosine deaminase and cytidine deaminase) is inserted at the N-terminus of amino acid residue 1026 or is inserted at the N-terminus of amino acid residue 1029, as numbered in the above Cas9 reference sequence, or a corresponding amino acid residue in another Cas9 polypeptide. In some embodiments, the deaminase (e.g., adenosine deaminase, cytidine deaminase, or adenosine deaminase and cytidine deaminase) is inserted at the C-terminus of amino acid residue 1026 or is inserted at the C-terminus of amino acid residue 1029, as numbered in the above Cas9 reference sequence, or a corresponding amino acid residue in another Cas9 polypeptide. In some embodiments, the deaminase (e.g., adenosine deaminase, cytidine deaminase, or adenosine deaminase and cytidine deaminase) is inserted to replace amino acid residue 1026, or is inserted to replace amino acid residue 1029, as numbered in the above Cas9 reference sequence, or corresponding amino acid residue in another Cas9 polypeptide.

[0360] In some embodiments, the deaminase (e.g., adenosine deaminase, cytidine deaminase, or adenosine deaminase and cytidine deaminase) is inserted at amino acid residue 1040 as numbered in the above Cas9 reference sequence, or a corresponding amino acid residue in another Cas9 polypeptide. In some embodiments, the deaminase (e.g., adenosine deaminase, cytidine deaminase, or adenosine deaminase and cytidine deaminase) is inserted at the N-terminus of amino acid residue 1040 as numbered in the above Cas9 reference sequence, or a corresponding amino acid residue in another Cas9 polypeptide. In some embodiments, the deaminase (e.g., adenosine deaminase, cytidine deaminase, or adenosine deaminase and cytidine deaminase) is inserted at the C-terminus of amino acid residue 1040 as numbered in the above Cas9 reference sequence, or a corresponding amino acid residue in another Cas9 polypeptide. In some embodiments, the deaminase (e.g., adenosine deaminase, cytidine deaminase, or adenosine deaminase and cytidine deaminase) is inserted to replace amino acid residue 1040 as numbered in the above Cas9 reference sequence, or a corresponding amino acid residue in another Cas9 polypeptide.

[0361] In some embodiments, the deaminase (e.g., adenosine deaminase, cytidine deaminase, or adenosine deaminase and cytidine deaminase) is inserted at amino acid residue 1052, or is inserted at amino acid residue 1054, as numbered in the above Cas9 reference sequence, or a corresponding amino acid residue in another Cas9 polypeptide. In some embodiments, the deaminase (e.g., adenosine deaminase, cytidine deaminase, or adenosine deaminase and cytidine deaminase) is inserted at the N-terminus of amino acid residue 1052 or is inserted at the N-terminus of amino acid residue 1054, as numbered in the above Cas9 reference sequence, or a corresponding amino acid residue in another Cas9 polypeptide. In some embodiments, the deaminase (e.g., adenosine deaminase, cytidine deaminase, or adenosine deaminase and cytidine deaminase) is inserted at the C-terminus of amino acid residue 1052 or is inserted at the C-terminus of amino acid residue 1054, as numbered in the above Cas9 reference sequence, or a corresponding amino acid residue in another Cas9 polypeptide. In some embodiments, the deaminase (e.g., adenosine deaminase, cytidine deaminase, or adenosine deaminase and cytidine deaminase) is inserted to replace amino acid residue 1052, or is inserted to replace amino acid residue 1054, as numbered in the above Cas9 reference sequence, or a corresponding amino acid residue in another Cas9 polypeptide.

[0362] In some embodiments, the deaminase (e.g., adenosine deaminase, cytidine deaminase, or adenosine deaminase and cytidine deaminase) is inserted at amino acid residue 1067, or is inserted at amino acid residue 1068, or is inserted at amino acid residue 1069, as numbered in the above Cas9 reference sequence, or a corresponding amino acid residue in another Cas9 polypeptide. In some embodiments, the deaminase (e.g., adenosine deaminase, cytidine deaminase, or adenosine deaminase and cytidine deaminase) is inserted at the N-terminus of amino acid residue 1067 or is inserted at the N-terminus of amino acid residue 1068 or is inserted at the N-terminus of amino acid residue 1069, as numbered in the above Cas9 reference sequence, or a corresponding amino acid residue in another Cas9 polypeptide. In some embodiments, the deaminase (e.g., adenosine deaminase, cytidine deaminase, or adenosine deaminase and cytidine deaminase) is inserted at the C-terminus of amino acid residue 1067 or is inserted at the C-terminus of amino acid residue 1068 or is inserted at the C-terminus of amino acid residue 1069, as numbered in the above Cas9 reference sequence, or a corresponding amino acid residue in another Cas9 polypeptide. In some embodiments, the deaminase (e.g., adenosine deaminase, cytidine deaminase, or adenosine deaminase and cytidine deaminase) is inserted to replace amino acid residue 1067, or is inserted to replace amino acid residue 1068, or is inserted to replace amino acid residue 1069, as numbered in the above Cas9 reference sequence, or a corresponding amino acid residue in another Cas9 polypeptide.

[0363] In some embodiments, the deaminase (e.g., adenosine deaminase, cytidine deaminase, or adenosine deaminase and cytidine deaminase) is inserted at amino acid residue 1246, or is inserted at amino acid residue 1247, or is inserted at amino acid residue 1248, as numbered in the above Cas9 reference sequence, or a corresponding amino acid residue in another Cas9 polypeptide. In some embodiments, the deaminase (e.g., adenosine deaminase, cytidine deaminase, or adenosine deaminase and cytidine deaminase) is inserted at the N-terminus of amino acid residue 1246 or is inserted at the N-terminus of amino acid residue 1247 or is inserted at the N-terminus of amino acid residue 1248, as numbered in the above Cas9 reference sequence, or a corresponding amino acid residue in another Cas9 polypeptide. In some embodiments, the deaminase (e.g., adenosine deaminase, cytidine deaminase, or adenosine deaminase and cytidine deaminase) is inserted at the C-terminus of amino acid residue 1246 or is inserted at the C-terminus of amino acid residue 1247 or is inserted at the C-terminus of amino acid residue 1248, as numbered in the above Cas9 reference sequence, or a corresponding amino acid residue in another Cas9 polypeptide. In some embodiments, the deaminase (e.g., adenosine deaminase, cytidine deaminase, or adenosine deaminase and cytidine deaminase) is inserted to replace amino acid residue 1246, or is inserted to replace amino acid residue 1247, or is inserted to replace amino acid residue 1248, as numbered in the above Cas9 reference sequence, or a corresponding amino acid residue in another Cas9 polypeptide.

[0364] In some embodiments, a heterologous polypeptide (e.g., deaminase) is inserted in a flexible loop of a Cas9 polypeptide. The flexible loop portions can be selected from the group consisting of 530-537, 569-570, 686-691, 943-947, 1002-1025, 1052-1077, 1232-1247, or 1298-1300 as numbered in the above Cas9 reference sequence, or a corresponding amino acid residue in another Cas9 polypeptide. The flexible loop portions can be selected from the group consisting of: 1-529, 538-568, 580-685, 692-942, 948-1001, 1026-1051, 1078-1231, or 1248-1297 as numbered in the above Cas9 reference sequence, or a corresponding amino acid residue in another Cas9 polypeptide.

[0365] A heterologous polypeptide (e.g., adenine deaminase) can be inserted into a Cas9 polypeptide region corresponding to amino acid residues: 1017-1069, 1242-1247, 1052-1056, 1060-1077, 1002-1003, 943-947, 530-537, 568-579, 686-691, 1242-1247, 1298-1300, 1066-1077, 1052-1056, or 1060-1077 as numbered in the above Cas9 reference sequence, or a corresponding amino acid residue in another Cas9 polypeptide.

[0366] A heterologous polypeptide (e.g., adenine deaminase) can be inserted in place of a deleted region of a Cas9 polypeptide. The deleted region can correspond to an N-terminal or C-terminal portion of the Cas9 polypeptide. In some embodiments, the deleted region corresponds to residues 792-872 as numbered in the above Cas9 reference sequence, or a corresponding amino acid residue in another Cas9 polypeptide. In some embodiments, the deleted region corresponds to residues 792-906 as numbered in the above Cas9 reference sequence, or a corresponding amino acid residue in another Cas9 polypeptide. In some embodiments, the deleted region corresponds to residues 2-791 as numbered in the above Cas9 reference sequence, or a corresponding amino acid residue in another Cas9 polypeptide. In some embodiments, the deleted region corresponds to residues 1017-1069 as numbered in the above Cas9 reference sequence, or corresponding amino acid residues thereof.

[0367] Exemplary internal fusions base editors are provided in Table 3 below:

TABLE 3
Insertion Ioci in Cas9 proteins

| BE ID | Modification | Other ID |
|---|---|---|
| IBE001 | Cas9 TadA ins 1015 | ISLAY01 |
| IBE002 | Cas9 TadA ins 1022 | ISLAY02 |
| IBE003 | Cas9 TadA ins 1029 | ISLAY03 |
| IBE004 | Cas9 TadA ins 1040 | ISLAY04 |
| IBE005 | Cas9 TadA ins 1068 | ISLAY05 |
| IBE006 | Cas9 TadA ins 1247 | ISLAY06 |
| IBE007 | Cas9 TadA ins 1054 | ISLAY07 |
| IBE008 | Cas9 TadA ins 1026 | ISLAY08 |
| IBE009 | Cas9 TadA ins 768 | ISLAY09 |
| IBE020 | delta HNH TadA 792 | ISLAY20 |
| IBE021 | N-term fusion single TadA helix truncated 165-end | ISLAY21 |
| IBE029 | TadA-Circular Permutant 116 ins 1067 | ISLAY29 |
| IBE031 | TadA-Circular Permutant 136 ins 1248 | ISLAY31 |
| IBE032 | TadA-Circular Permutant 136 ins 1052 | ISLAY32 |
| IBE035 | delta 792-872 TadA ins | ISLAY35 |
| IBE036 | delta 792-906 TadA ins | ISLAY36 |
| IBE043 | TadA-Circular Permutant 65 ins 1246 | ISLAY43 |
| IBE044 | TadA ins C-term truncate2 791 | ISLAY44 |

[0368] A heterologous polypeptide (e.g., deaminase) can be inserted within a structural or functional domain of a Cas9 polypeptide. A heterologous polypeptide (e.g., deaminase) can be inserted between two structural or functional domains of a Cas9 polypeptide. A heterologous polypeptide (e.g., deaminase) can be inserted in place of a structural or functional domain of a Cas9 polypeptide, for example, after deleting the domain from the Cas9 polypeptide. The structural or functional domains of a Cas9 polypeptide can include, for example, RuvC I, RuvC II, RuvC III, Rec1, Rec2, PI, or HNH.

[0369] In some embodiments, the Cas9 polypeptide lacks one or more domains selected from the group consisting of: RuvC I, RuvC II, RuvC III, Rec1, Rec2, PI, or HNH domain. In some embodiments, the Cas9 polypeptide lacks a nuclease domain. In some embodiments, the Cas9 polypeptide lacks an HNH domain. In some embodiments, the Cas9 polypeptide lacks a portion of the HNH domain such that the Cas9 polypeptide has reduced or abolished HNH activity. In some embodiments, the Cas9 polypeptide comprises a deletion of the nuclease domain, and the deaminase is inserted to replace the nuclease domain. In some embodiments, the HNH domain is deleted and the deaminase is inserted in its place. In some embodiments, one or more of the RuvC domains is deleted and the deaminase is inserted in its place.

[0370] A fusion protein comprising a heterologous polypeptide can be flanked by a N-terminal and a C-terminal fragment of a napDNAbp. In some embodiments, the fusion protein comprises a deaminase flanked by a N-terminal fragment and a C-terminal fragment of a Cas9 polypeptide. The N terminal fragment or the C terminal fragment can bind the target polynucleotide sequence. The C-terminus of the N terminal fragment or the N-terminus of the C terminal fragment can comprise a part of a flexible loop of a Cas9 polypeptide. The C-terminus of the N terminal fragment or the N-terminus of the C terminal fragment can comprise a part of an alpha-helix structure of the Cas9 polypeptide. The N-terminal fragment or the C-terminal fragment can comprise a DNA binding domain. The N-terminal fragment or the C-terminal fragment can comprise a RuvC domain. The N-terminal fragment or the C-terminal fragment can comprise an HNH domain. In some embodiments, neither of the N-terminal fragment and the C-terminal fragment comprises an HNH domain.

[0371] In some embodiments, the C-terminus of the N terminal Cas9 fragment comprises an amino acid that is in proximity to a target nucleobase when the fusion protein deaminates the target nucleobase. In some embodiments, the N-terminus of the C terminal Cas9 fragment comprises an amino acid that is in proximity to a target nucleobase when the fusion protein deaminates the target nucleobase. The insertion location of different deaminases can be different in order to have proximity between the target nucleobase and an amino acid in the C-terminus of the N terminal Cas9 fragment or the N-terminus of the C terminal Cas9 fragment. For example, the insertion position of an deaminase can be at an amino acid residue selected from the group consisting of: 1015, 1022, 1029, 1040, 1068, 1247, 1054, 1026, 768, 1067, 1248, 1052, and 1246 as numbered in the above Cas9 reference sequence, or a corresponding amino acid residue in another Cas9 polypeptide.

[0372] The N-terminal Cas9 fragment of a fusion protein (i.e. the N-terminal Cas9 fragment flanking the deaminase in a fusion protein) can comprise the N-terminus of a Cas9 polypeptide. The N-terminal Cas9 fragment of a fusion protein can comprise a length of at least about: 100, 200, 300, 400, 500, 600, 700, 800, 900, 1000, 1100, 1200, or 1300 amino acids. The N-terminal Cas9 fragment of a fusion protein can comprise a sequence corresponding to amino acid residues: 1-56, 1-95, 1-200, 1-300, 1-400, 1-500, 1-600, 1-700, 1-718, 1-765, 1-780, 1-906, 1-918, or 1-1100 as numbered in the above Cas9 reference sequence, or a corresponding amino acid residue in another Cas9 polypeptide. The N-terminal Cas9 fragment can comprise a sequence comprising at least: 85%, at least 90%, at least 91%, at least 92%, at least 93%, at least 94%, at least 95%, at least 96%, at least 97%, at least 98%, at least 99%, or at least 99.5% sequence identity to amino acid residues: 1-56, 1-95, 1-200, 1-300, 1-400, 1-500, 1-600, 1-700, 1-718, 1-765, 1-780, 1-906, 1-918, or 1-1100 as numbered in the above Cas9 reference sequence, or a corresponding amino acid residue in another Cas9 polypeptide.

[0373] The C-terminal Cas9 fragment of a fusion protein (i.e. the C-terminal Cas9 fragment flanking the deaminase in a fusion protein) can comprise the C-terminus of a Cas9 polypeptide. The C-terminal Cas9 fragment of a fusion protein can comprise a length of at least about: 100, 200, 300, 400, 500, 600, 700, 800, 900, 1000, 1100, 1200, or 1300 amino acids. The C-terminal Cas9 fragment of a fusion protein can comprise a sequence corresponding to amino acid residues: 1099-1368, 918-1368, 906-1368, 780-1368, 765-1368, 718-1368, 94-1368, or 56-1368 as numbered in the above Cas9 reference sequence, or a corresponding amino acid residue in another Cas9 polypeptide. The N-terminal Cas9 fragment can comprise a sequence comprising at least: 85%, at least 90%, at least 91%, at least 92%, at least 93%, at least 94%, at least 95%, at least 96%, at least 97%, at least 98%, at least 99%, or at least 99.5% sequence identity to amino acid residues: 1099-1368, 918-1368, 906-1368, 780-1368, 765-1368, 718-1368, 94-1368, or 56-1368 as numbered in the above Cas9 reference sequence, or a corresponding amino acid residue in another Cas9 polypeptide.

[0374] The N-terminal Cas9 fragment and C-terminal Cas9 fragment of a fusion protein taken together may not correspond to a full-length naturally occurring Cas9 polypeptide sequence, for example, as set forth in the above Cas9 reference sequence.

[0375] The fusion protein described herein can effect targeted deamination with reduced deamination at non-target sites (e.g., off-target sites), such as reduced genome wide spurious deamination. The fusion protein described herein can effect targeted deamination with reduced bystander deamination at non-target sites. The undesired deamination or off-target deamination can be reduced by at least 30%, at least 40%, at least 50%, at least 60%, at least 70%, at least 80%, at least 90%, at least 95%, or at least 99% compared with, for example, an end terminus fusion protein comprising the deaminase fused to a N terminus or a C terminus of a Cas9 polypeptide. The undesired deamination or off-target deamination can be reduced by at least one-fold, at least two-fold, at least three-fold, at least four-fold, at least five-fold, at least tenfold, at least fifteen fold, at least twenty fold, at least thirty fold, at least forty fold, at least fifty fold, at least 60 fold, at least 70 fold, at least 80 fold, at least 90 fold, or at least hundred fold, compared with, for example, an end terminus fusion protein comprising the deaminase fused to a N terminus or a C terminus of a Cas9 polypeptide.

[0376] In some embodiments, the deaminase (e.g., adenosine deaminase, cytidine deaminase, or adenosine deaminase and cytidine deaminase) of the fusion protein deaminates no more than two nucleobases within the range of an R-loop. In some embodiments, the deaminase of the fusion protein deaminates no more than three nucleobases within the range of the R-loop. In some embodiments, the deaminase of the fusion protein deaminates no more than 2, 3, 4, 5, 6, 7, 8, 9, or 10 nucleobases within the range of the R-loop. An R-loop is a three-stranded nucleic acid structure including a DNA:RNA hybrid, a DNA:DNA or an RNA: RNA complementary structure and the associated with single-stranded DNA. As used herein, an R-loop may be formed when a target polynucleotide is contacted with a CRISPR complex or a base editing complex, wherein a portion of a guide polynucleotide, e.g. a guide RNA, hybridizes with and displaces with a portion of a target polynucleotide, e.g. a target DNA. In some embodiments, an R-loop comprises a hybridized region of a spacer sequence and a target DNA complementary sequence. An R-loop region may be of about 5, 6, 7, 8, 9, 10, 11, 12, 13, 14, 15, 16, 17, 18, 19, 20, 21, 22, 23, 24, 25, 26, 27, 28, 29, 30, 31, 32, 33, 34, 35, 36, 37, 38, 39, 40, 41, 42, 43, 44, 45, 46, 47, 48, 49, or 50 nucleobase pairs in length. In some embodiments, the R-loop region is about 20 nucleobase pairs in length. It should be understood that, as used herein, an R-loop region is not limited to the target DNA strand that hybridizes with the guide polynucleotide. For example, editing of a target nucleobase within an R-loop region may be to a DNA strand that comprises the complementary strand to a guide RNA, or may be to a DNA strand that is the opposing strand of the strand complementary to the guide RNA. In some embodiments, editing in the region of the R-loop comprises editing a nucleobase on non-complementary strand (protospacer strand) to a guide RNA in a target DNA sequence.

[0377] The fusion protein described herein can effect target deamination in an editing window different from canonical base editing. In some embodiments, a target nucleobase is from about 1 to about 20 bases upstream of a PAM sequence in the target polynucleotide sequence. In some embodiments, a target nucleobase is from about 2 to about 12 bases upstream of a PAM sequence in the target polynucleotide sequence. In some embodiments, a target nucleobase is from about 1 to 9 base pairs, about 2 to 10 base pairs, about 3 to 11 base pairs, about 4 to 12 base pairs, about 5 to 13 base pairs, about 6 to 14 base pairs, about 7 to 15 base pairs, about 8 to 16 base pairs, about 9 to 17 base pairs, about 10 to 18 base pairs, about 11 to 19 base pairs, about 12 to 20 base pairs, about 1 to 7 base pairs, about 2 to 8 base pairs, about 3 to 9 base pairs, about 4 to 10 base pairs, about 5 to 11 base pairs, about 6 to 12 base pairs, about 7 to 13 base pairs, about 8 to 14 base pairs, about 9 to 15 base pairs, about 10 to 16 base pairs, about 11 to 17 base pairs, about 12 to 18 base pairs, about 13 to 19 base pairs, about 14 to 20 base pairs, about 1 to 5 base pairs, about 2 to 6 base pairs, about 3 to 7 base pairs, about 4 to 8 base pairs, about 5 to 9 base pairs, about 6 to 10 base pairs, about 7 to 11 base pairs, about 8 to 12 base pairs, about 9 to 13 base pairs, about 10 to 14 base pairs, about 11 to 15 base pairs, about 12 to 16 base pairs, about 13 to 17 base pairs, about 14 to 18 base pairs, about 15 to 19 base pairs, about 16 to 20 base pairs, about 1 to 3 base pairs, about 2 to 4 base pairs, about 3 to 5 base pairs, about 4 to 6 base pairs, about 5 to 7 base pairs, about 6 to 8 base pairs, about 7 to 9 base pairs, about 8 to 10 base pairs, about 9 to 11 base pairs, about 10 to 12 base pairs, about 11 to 13 base pairs, about 12 to 14 base pairs, about 13 to 15 base pairs, about 14 to 16 base pairs, about 15 to 17 base pairs, about 16 to 18 base pairs, about 17 to 19 base pairs, about 18 to 20 base pairs away or upstream of the PAM sequence. In some embodiments, a target nucleobase is about 1, 2, 3, 4, 5, 6, 7, 8, 9, 10, 11, 12, 13, 14, 15, 16, 17, 18, 19, 20, or more base pairs away from or upstream of the PAM sequence. In some embodiments, a target nucleobase is about 1, 2, 3, 4, 5, 6, 7, 8, or 9 base pairs upstream of the PAM sequence. In some embodiments, a target nucleobase is about 2, 3, 4, or 6 base pairs upstream of the PAM sequence.

[0378] The fusion protein can comprise more than one heterologous polypeptide. For example, the fusion protein can additionally comprise one or more UGI domains and/or one or more nuclear localization signals. The two or more heterologous domains can be inserted in tandem. The two or more heterologous domains can be inserted at locations such that they are not in tandem in the NapDNAbp.

[0379] A fusion protein can comprise a linker between the deaminase and the napDNAbp polypeptide. The linker can be a peptide or a non-peptide linker. For example, the linker can be an XTEN, (GGGS)n (SEQ ID NO: 1308), (GGGGS)n (SEQ ID NO: 109), (G)n, (EAAAK)n (SEQ ID NO: 1309), (GGS)n, SGSETPGTSESATPES (SEQ ID NO: 56). In some embodiments, the fusion protein comprises a linker between the N-terminal Cas9 fragment and the deaminase. In some embodiments, the fusion protein comprises a linker between the C-terminal Cas9 fragment and the deaminase. In some embodiments, the N-terminal and C-terminal fragments of napDNAbp are connected to the deaminase with a linker. In some embodiments, the N-terminal and C-terminal fragments are joined to the deaminase domain without a linker. In some embodiments, the fusion protein comprises a linker between the N-terminal Cas9 fragment and the deaminase, but does not comprise a linker between the C-terminal Cas9 fragment and the deaminase. In some embodiments, the fusion protein comprises a linker between the C-terminal Cas9 fragment and the deaminase, but does not comprise a linker between the N-terminal Cas9 fragment and the deaminase.

[0380] In some embodiments, the napDNAbp in the fusion protein is a Cas12 polypeptide, e.g., Cas12b/C2c1, or a fragment thereof. The Cas12 polypeptide can be a variant Cas12 polypeptide. In other embodiments, the N- or C-terminal fragments of the Cas12 polypeptide comprise a nucleic acid programmable DNA binding domain or a RuvC domain. In other embodiments, the fusion protein contains a linker between the Cas12 polypeptide and the catalytic domain. In other embodiments, the amino acid sequence of the linker is GGSGGS (SEQ ID NO: 273) or GSSGSETPGTSESATPESSG (SEQ ID NO: 1310). In other embodiments, the linker is a rigid linker. In other embodiments of the above aspects, the linker is encoded by GGAGGCTCTGGAGGAAGC (SEQ ID NO: 1311) or GGCTCTTCTGGATCTGAAACACCTGGCACAAGCGAGAGCGCCACCCCTGAGAGCTCTGGC (SEQ ID NO: 1312).

[0381] Fusion proteins comprising a heterologous catalytic domain flanked by N- and C-terminal fragments of a Cas12 polypeptide are also useful for base editing in the methods as described herein. Fusion proteins comprising Cas12 and one or more deaminase domains, e.g., adenosine deaminase, or comprising an adenosine deaminase domain flanked by Cas12 sequences are also useful for highly specific and efficient base editing of target sequences. In an embodiment, a chimeric Cas12 fusion protein contains a heterologous catalytic domain (e.g., adenosine deaminase, cytidine deaminase, or adenosine deaminase and cytidine deaminase) inserted within a Cas12 polypeptide. In some embodiments, the fusion protein comprises an adenosine deaminase domain and a cytidine deaminase domain inserted within a Cas12. In some embodiments, an adenosine deaminase is fused within Cas12 and a cytidine deaminase is fused to the C-terminus. In some embodiments, an adenosine deaminase is fused within Cas12 and a cytidine deaminase fused to the N-terminus. In some embodiments, a cytidine deaminase is fused within Cas12 and an adenosine deaminase is fused to the C-terminus. In some embodiments, a cytidine deaminase is fused within Cas12 and an adenosine deaminase fused to the N-terminus. Exemplary structures of a fusion protein with an adenosine deaminase and a cytidine deaminase and a Cas12 are provided as follows:
[0382] NH2-[Cas12(adenosine deaminase)]-[cytidine deaminase]-COOH;
[0383] NH2-[cytidine deaminase]-[Cas12(adenosine deaminase)]-COOH;
[0384] NH2-[Cas12(cytidine deaminase)]-[adenosine deaminase]-COOH; or
[0385] NH2-[adenosine deaminase]-[Cas12(cytidine deaminase)]-COOH;

[0386] In some embodiments, the “-” used in the general architecture above indicates the presence of an optional linker.

[0387] In various embodiments, the catalytic domain has DNA modifying activity (e.g., deaminase activity), such as adenosine deaminase activity. In some embodiments, the adenosine deaminase is a TadA (e.g., TadA*7.10). In some embodiments, the TadA is a TadA*8. In some embodiments, a TadA*8 is fused within Cas12 and a cytidine deaminase is fused to the C-terminus. In some embodiments, a TadA*8 is fused within Cas12 and a cytidine deaminase fused to the N-terminus. In some embodiments, a cytidine deaminase is fused within Cas12 and a TadA*8 is fused to the C-terminus. In some embodiments, a cytidine deaminase is fused within Cas12 and a TadA*8 fused to the N-terminus. Exemplary structures of a fusion protein with a TadA*8 and a cytidine deaminase and a Cas12 are provided as follows:
[0388] N-[Cas12(TadA*8)]-[cytidine deaminase]-C;
[0389] N-[cytidine deaminase]-[Cas12(TadA*8)]-C;
[0390] N-[Cas12(cytidine deaminase)]-[TadA*8]-C; or
[0391] N-[TadA*8]-[Cas12(cytidine deaminase)]-C.

[0392] In some embodiments, the “-” used in the general architecture above indicates the presence of an optional linker.

[0393] In other embodiments, the fusion protein contains one or more catalytic domains. In other embodiments, at least one of the one or more catalytic domains is inserted within the Cas12 polypeptide or is fused at the Cas12 N-terminus or C-terminus. In other embodiments, at least one of the one or more catalytic domains is inserted within a loop, an alpha helix region, an unstructured portion, or a solvent accessible portion of the Cas12 polypeptide. In other embodiments, the Cas12 polypeptide is Cas12a, Cas12b, Cas12c, Cas12d, Cas12e, Cas12g, Cas12h, Cas12i, or Cas12j/Casϕ. In other embodiments, the Cas12 polypeptide has at least about 85% amino acid sequence identity to Bacillus hisashii Cas12b, Bacillus thermoamylovorans Cas12b, Bacillus sp. V3-13 Cas12b, or Alicyclobacillus acidiphilus Cas12b (SEQ ID NO: 259). In other embodiments, the Cas12 polypeptide has at least about 90% amino acid sequence identity to Bacillus hisashii Cas12b (SEQ ID NO: 260), Bacillus thermoamylovorans Cas12b, Bacillus sp. V3-13 Cas12b, or Alicyclobacillus acidiphilus Cas12b. In other embodiments, the Cas12 polypeptide has at least about 95% amino acid sequence identity to Bacillus hisashii Cas12b, Bacillus thermoamylovorans Cas12b (SEQ ID NO: 265), Bacillus sp. V3-13 Cas12b (SEQ ID NO: 264), or Alicyclobacillus acidiphilus Cas12b. In other embodiments, the Cas12 polypeptide contains or consists essentially of a fragment of Bacillus hisashii Cas12b, Bacillus thermoamylovorans Cas12b, Bacillus sp. V3-13 Cas12b, or Alicyclobacillus acidiphilus Cas12b. In embodiments, the Cas12 polypeptide contains BvCas12b (V4), which in some embodiments is expressed as 5′ mRNA Cap—5′ UTR—bhCas12b—STOP sequence—3′ UTR 120polyA tail (SEQ ID NOs: 261-263).

[0394] In other embodiments, the catalytic domain is inserted between amino acid positions 153-154, 255-256, 306-307, 980-981, 1019-1020, 534-535, 604-605, or 344-345 of BhCas12b or a corresponding amino acid residue of Cas12a, Cas12c, Cas12d, Cas12e, Cas12g, Cas12h, Cas12i, or Cas12j/Casϕ. In other embodiments, the catalytic domain is inserted between amino acids P153 and S154 of BhCas12b. In other embodiments, the catalytic domain is inserted between amino acids K255 and E256 of BhCas12b. In other embodiments, the catalytic domain is inserted between amino acids D980 and G981 of BhCas12b. In other embodiments, the catalytic domain is inserted between amino acids K1019 and L1020 of BhCas12b. In other embodiments, the catalytic domain is inserted between amino acids F534 and P535 of BhCas12b. In other embodiments, the catalytic domain is inserted between amino acids K604 and G605 of BhCas12b. In other embodiments, the catalytic domain is inserted between amino acids H344 and F345 of BhCas12b. In other embodiments, catalytic domain is inserted between amino acid positions 147 and 148, 248 and 249, 299 and 300, 991 and 992, or 1031 and 1032 of BvCas12b or a corresponding amino acid residue of Cas12a, Cas12c, Cas12d, Cas12e, Cas12g, Cas12h, Cas12i, or Cas12j/Casϕ. In other embodiments, the catalytic domain is inserted between amino acids P147 and D148 of BvCas12b. In other embodiments, the catalytic domain is inserted between amino acids G248 and G249 of BvCas12b. In other embodiments, the catalytic domain is inserted between amino acids P299 and E300 of BvCas12b. In other embodiments, the catalytic domain is inserted between amino acids G991 and E992 of BvCas12b. In other embodiments, the catalytic domain is inserted between amino acids K1031 and M1032 of BvCas12b. In other embodiments, the catalytic domain is inserted between amino acid positions 157 and 158, 258 and 259, 310 and 311, 1008 and 1009, or 1044 and 1045 of AaCas12b or a corresponding amino acid residue of Cas12a, Cas12c, Cas12d, Cas12e, Cas12g, Cas12h, Cas12i, or Cas12j/Casϕ. In other embodiments, the catalytic domain is inserted between amino acids P157 and G158 of AaCas12b. In other embodiments, the catalytic domain is inserted between amino acids V258 and G259 of AaCas12b. In other embodiments, the catalytic domain is inserted between amino acids D310 and P311 of AaCas12b. In other embodiments, the catalytic domain is inserted between amino acids G1008 and E1009 of AaCas12b. In other embodiments, the catalytic domain is inserted between amino acids G1044 and K1045 at of AaCas12b.

[0395] In other embodiments, the fusion protein contains a nuclear localization signal (e.g., a bipartite nuclear localization signal). In other embodiments, the amino acid sequence of the nuclear localization signal is MAPKKKRKVGIHGVPAA (SEQ ID NO: 1313). In other embodiments of the above aspects, the nuclear localization signal is encoded by the following sequence:

[0396] ATGGCCCCAAAGAAGAAGCGGAAGGTCGGTATCCACGGAGTCCCAGCAGCC (SEQ ID NO: 1314). In other embodiments, the Cas12b polypeptide contains a mutation that silences the catalytic activity of a RuvC domain. In other embodiments, the Cas12b polypeptide contains D574A, D829A and/or D952A mutations. In other embodiments, the fusion protein further contains a tag (e.g., an influenza hemagglutinin tag).

[0397] In some embodiments, the fusion protein comprises a napDNAbp domain (e.g., Cas12-derived domain) with an internally fused nucleobase editing domain (e.g., all or a portion of a deaminase domain, e.g., an adenosine deaminase domain). In some embodiments, the napDNAbp is a Cas12b. In some embodiments, the base editor comprises a BhCas12b domain with an internally fused TadA*8 domain inserted at the loci provided in Table 4 below.

TABLE 4
Insertion Ioci in Cas 12b proteins

| | | Inserted |
|---|---|---|
| | Insertion site | between aa |
| BhCas12b | | |
| position 1 | 153 | PS |
| position 2 | 255 | KE |
| position 3 | 306 | DE |
| position 4 | 980 | DG |
| position 5 | 1019 | KL |
| position 6 | 534 | FP |
| position 7 | 604 | KG |
| position 8 | 344 | HF |
| BvCas 12b | | |
| position 1 | 147 | PD |
| position 2 | 248 | GG |
| position 3 | 299 | PE |
| position 4 | 991 | GE |
| position 5 | 1031 | KM |
| AaCas12b | | |
| position 1 | 157 | PG |
| position 2 | 258 | VG |
| position 3 | 310 | DP |
| position 4 | 1008 | GE |
| position 5 | 1044 | GK |

[0398] By way of nonlimiting example, an adenosine deaminase (e.g., TadA*8.13) may be inserted into a BhCas12b to produce a fusion protein (e.g., TadA*8.13-BhCas12b) that effectively edits a nucleic acid sequence.

[0399] In some embodiments, the base editing system described herein is an ABE with TadA inserted into a Cas9. Polypeptide sequences of relevant ABEs with TadA inserted into a Cas9 are provided in the attached Sequence Listing as SEQ ID NOs: 1315-1360.

[0400] In some embodiments, adenosine deaminase base editors were generated to insert TadA or variants thereof into the Cas9 polypeptide at the identified positions.

[0401] Exemplary, yet nonlimiting, fusion proteins are described in International PCT Application Nos. PCT/US2020/016285 and U.S. Provisional Application Nos. 62/852,228 and 62/852,224, the contents of which are incorporated by reference herein in their entireties.

### A to G Editing

[0402] In some embodiments, a base editor described herein comprises an adenosine deaminase domain. Such an adenosine deaminase domain of a base editor can facilitate the editing of an adenine (A) nucleobase to a guanine (G) nucleobase by deaminating the A to form inosine (I), which exhibits base pairing properties of G. Adenosine deaminase is capable of deaminating (i.e., removing an amine group) adenine of a deoxyadenosine residue in deoxyribonucleic acid (DNA). In some embodiments, an A-to-G base editor further comprises an inhibitor of inosine base excision repair, for example, a uracil glycosylase inhibitor (UGI) domain or a catalytically inactive inosine specific nuclease. Without wishing to be bound by any particular theory, the UGI domain or catalytically inactive inosine specific nuclease can inhibit or prevent base excision repair of a deaminated adenosine residue (e.g., inosine), which can improve the activity or efficiency of the base editor.

[0403] A base editor comprising an adenosine deaminase can act on any polynucleotide, including DNA, RNA and DNA-RNA hybrids. In certain embodiments, a base editor comprising an adenosine deaminase can deaminate a target A of a polynucleotide comprising RNA. For example, the base editor can comprise an adenosine deaminase domain capable of deaminating a target A of an RNA polynucleotide and/or a DNA-RNA hybrid polynucleotide. In an embodiment, an adenosine deaminase incorporated into a base editor comprises all or a portion of adenosine deaminase acting on RNA (ADAR, e.g., ADAR1 or ADAR2) or tRNA (ADAT). A base editor comprising an adenosine deaminase domain can also be capable of deaminating an A nucleobase of a DNA polynucleotide. In an embodiment an adenosine deaminase domain of a base editor comprises all or a portion of an ADAT comprising one or more mutations which permit the ADAT to deaminate a target A in DNA. For example, the base editor can comprise all or a portion of an ADAT from Escherichia coli (EcTadA) comprising one or more of the following mutations: D108N, A106V, D147Y, E155V, L84F, H123Y, I156F, or a corresponding mutation in another adenosine deaminase. Exemplary ADAT homolog polypeptide sequences are provided in the Sequence Listing as SEQ ID NOs: 1363-1370.

[0404] The adenosine deaminase can be derived from any suitable organism (e.g., E. coli). In some embodiments, the adenosine deaminase is from a prokaryote. In some embodiments, the adenosine deaminase is from a bacterium. In some embodiments, the adenosine deaminase is from Escherichia coli, Staphylococcus aureus, Salmonella typhi, Shewanella putrefaciens, Haemophilus influenzae, Caulobacter crescentus, or Bacillus subtilis. In some embodiments, the adenosine deaminase is from E. coli. In some embodiments, the adenine deaminase is a naturally-occurring adenosine deaminase that includes one or more mutations corresponding to any of the mutations provided herein (e.g., mutations in ecTadA). The corresponding residue in any homologous protein can be identified by e.g., sequence alignment and determination of homologous residues. The mutations in any naturally-occurring adenosine deaminase (e.g., having homology to ecTadA) that correspond to any of the mutations described herein (e.g., any of the mutations identified in ecTadA) can be generated accordingly.

[0405] In some embodiments, the adenosine deaminase comprises an amino acid sequence that is at least 60%, at least 65%, at least 70%, at least 75%, at least 80%, at least 85%, at least 90%, at least 95%, at least 96%, at least 97%, at least 98%, at least 99%, or at least 99.5% identical to any one of the amino acid sequences set forth in any of the adenosine deaminases provided herein. It should be appreciated that adenosine deaminases provided herein may include one or more mutations (e.g., any of the mutations provided herein). The disclosure provides any deaminase domains with a certain percent identify plus any of the mutations or combinations thereof described herein. In some embodiments, the adenosine deaminase comprises an amino acid sequence that has 1, 2, 3, 4, 5, 6, 7, 8, 9, 10, 11, 12, 13, 14, 15, 16, 17, 18, 19, 20, 21, 22, 21, 24, 25, 26, 27, 28, 29, 30, 31, 32, 33, 34, 35, 36, 37, 38, 39, 40, 41, 42, 43, 44, 45, 46, 47, 48, 49, 50, or more mutations compared to a reference sequence, or any of the adenosine deaminases provided herein. In some embodiments, the adenosine deaminase comprises an amino acid sequence that has at least 5, at least 10, at least 15, at least 20, at least 25, at least 30, at least 35, at least 40, at least 45, at least 50, at least 60, at least 70, at least 80, at least 90, at least 100, at least 110, at least 120, at least 130, at least 140, at least 150, at least 160, or at least 170 identical contiguous amino acid residues as compared to any one of the amino acid sequences known in the art or described herein.

[0406] It should be appreciated that any of the mutations provided herein (e.g., based on the TadA reference sequence) can be introduced into other adenosine deaminases, such as E. coli TadA (ecTadA), S. aureus TadA (saTadA), or other adenosine deaminases (e.g., bacterial adenosine deaminases). It would be apparent to the skilled artisan that additional deaminases may similarly be aligned to identify homologous amino acid residues that can be mutated as provided herein. Thus, any of the mutations identified in the TadA reference sequence can be made in other adenosine deaminases (e.g., ecTada) that have homologous amino acid residues. It should also be appreciated that any of the mutations provided herein can be made individually or in any combination in the TadA reference sequence or another adenosine deaminase.

[0407] In some embodiments, the adenosine deaminase comprises a D108X mutation in the TadA reference sequence, or a corresponding mutation in another adenosine deaminase, where X indicates any amino acid other than the corresponding amino acid in the wild-type adenosine deaminase. In some embodiments, the adenosine deaminase comprises a D108G, D108N, D108V, D108A, or D108Y mutation in TadA reference sequence, or a corresponding mutation in another adenosine deaminase. It should be appreciated, however, that additional deaminases may similarly be aligned to identify homologous amino acid residues that can be mutated as provided herein.

[0408] In some embodiments, the adenosine deaminase comprises an A106X mutation in TadA reference sequence, or a corresponding mutation in another adenosine deaminase, where X indicates any amino acid other than the corresponding amino acid in the wild-type adenosine deaminase. In some embodiments, the adenosine deaminase comprises an A106V mutation in TadA reference sequence, or a corresponding mutation in another adenosine deaminase (e.g., ecTadA).

[0409] In some embodiments, the adenosine deaminase comprises a E155X mutation in TadA reference sequence, or a corresponding mutation in another adenosine deaminase, where the presence of X indicates any amino acid other than the corresponding amino acid in the wild-type adenosine deaminase. In some embodiments, the adenosine deaminase comprises a E155D, E155G, or E155V mutation in TadA reference sequence, or a corresponding mutation in another adenosine deaminase (e.g., ecTadA).

[0410] In some embodiments, the adenosine deaminase comprises a D147X mutation in TadA reference sequence, or a corresponding mutation in another adenosine deaminase, where the presence of X indicates any amino acid other than the corresponding amino acid in the wild-type adenosine deaminase. In some embodiments, the adenosine deaminase comprises a D147Y, mutation in TadA reference sequence, or a corresponding mutation in another adenosine deaminase (e.g., ecTadA).

[0411] In some embodiments, the adenosine deaminase comprises an A106X, E155X, or D147X, mutation in the TadA reference sequence, or a corresponding mutation in another adenosine deaminase (e.g., ecTadA), where X indicates any amino acid other than the corresponding amino acid in the wild-type adenosine deaminase. In some embodiments, the adenosine deaminase comprises an E155D, E155G, or E155V mutation. In some embodiments, the adenosine deaminase comprises a D147Y.

[0412] It should also be appreciated that any of the mutations provided herein may be made individually or in any combination in ecTadA or another adenosine deaminase. For example, an adenosine deaminase may contain a D108N, a A106V, a E155V, and/or a D147Y mutation in TadA reference sequence, or a corresponding mutation in another adenosine deaminase (e.g., ecTadA). In some embodiments, an adenosine deaminase comprises the following group of mutations (groups of mutations are separated by a “;”) in TadA reference sequence, or corresponding mutations in another adenosine deaminase: D108N and A106V; D108N and E155V; D108N and D147Y; A106V and E155V; A106V and D147Y; E155V and D147Y; D108N, A106V, and E155V; D108N, A106V, and D147Y; D108N, E155V, and D147Y; A106V, E155V, and D147Y; and D108N, A106V, E155V, and D147Y. It should be appreciated, however, that any combination of corresponding mutations provided herein may be made in an adenosine deaminase (e.g., ecTadA).

[0413] In some embodiments, the adenosine deaminase comprises one or more of a H8X, T17X, L18X, W23X, L34X, W45X, R51X, A56X, E59X, E85X, M94X, 195X, V102X, F104X, A106X, R107X, D108X, K110X, M118X, N127X, A138X, F149X, M151X, R153X, Q154X, I156X, and/or K157X mutation in TadA reference sequence, or one or more corresponding mutations in another adenosine deaminase, where the presence of X indicates any amino acid other than the corresponding amino acid in the wild-type adenosine deaminase. In some embodiments, the adenosine deaminase comprises one or more of H8Y, T17S, L18E, W23L, L34S, W45L, R51H, A56E, or A56S, E59G, E85K, or E85G, M94L, 195L, V102A, F104L, A106V, R107C, or R107H, or R107P, D108G, or D108N, or D108V, or D108A, or D108Y, K110I, M118K, N127S, A138V, F149Y, M151V, R153C, Q154L, I156D, and/or K157R mutation in TadA reference sequence, or one or more corresponding mutations in another adenosine deaminase.

[0414] In some embodiments, the adenosine deaminase comprises one or more of a H8X, D108X, and/or N127X mutation in TadA reference sequence, or one or more corresponding mutations in another adenosine deaminase, where X indicates the presence of any amino acid. In some embodiments, the adenosine deaminase comprises one or more of a H8Y, D108N, and/or N127S mutation in TadA reference sequence, or one or more corresponding mutations in another adenosine deaminase.

[0415] In some embodiments, the adenosine deaminase comprises one or more of H8X, R26X, M61X, L68X, M70X, A106X, D108X, A109X, N127X, D147X, R152X, Q154X, E155X, K161X, Q163X, and/or T166X mutation in TadA reference sequence, or one or more corresponding mutations in another adenosine deaminase, where X indicates the presence of any amino acid other than the corresponding amino acid in the wild-type adenosine deaminase. In some embodiments, the adenosine deaminase comprises one or more of H8Y, R26W, M61I, L68Q, M70V, A106T, D108N, A109T, N127S, D147Y, R152C, Q154H or Q154R, E155G or E155V or E155D, K161Q, Q163H, and/or T166P mutation in TadA reference sequence, or one or more corresponding mutations in another adenosine deaminase.

[0416] In some embodiments, the adenosine deaminase comprises one, two, three, four, five, or six mutations selected from the group consisting of H8X, D108X, N127X, D147X, R152X, and Q154X in TadA reference sequence, or a corresponding mutation or mutations in another adenosine deaminase (e.g., ecTadA), where X indicates the presence of any amino acid other than the corresponding amino acid in the wild-type adenosine deaminase. In some embodiments, the adenosine deaminase comprises one, two, three, four, five, six, seven, or eight mutations selected from the group consisting of H8X, M61X, M70X, D108X, N127X, Q154X, E155X, and Q163X in TadA reference sequence, or a corresponding mutation or mutations in another adenosine deaminase (e.g., ecTadA), where X indicates the presence of any amino acid other than the corresponding amino acid in the wild-type adenosine deaminase. In some embodiments, the adenosine deaminase comprises one, two, three, four, or five, mutations selected from the group consisting of H8X, D108X, N127X, E155X, and T166X in TadA reference sequence, or a corresponding mutation or mutations in another adenosine deaminase (e.g., ecTadA), where X indicates the presence of any amino acid other than the corresponding amino acid in the wild-type adenosine deaminase.

[0417] In some embodiments, the adenosine deaminase comprises one, two, three, four, five, or six mutations selected from the group consisting of H8X, A106X, and D108X, or a corresponding mutation or mutations in another adenosine deaminase, where X indicates the presence of any amino acid other than the corresponding amino acid in the wild-type adenosine deaminase. In some embodiments, the adenosine deaminase comprises one, two, three, four, five, six, seven, or eight mutations selected from the group consisting of H8X, R26X, L68X, D108X, N127X, D147X, and E155X, or a corresponding mutation or mutations in another adenosine deaminase, where X indicates the presence of any amino acid other than the corresponding amino acid in the wild-type adenosine deaminase.

[0418] In some embodiments, the adenosine deaminase comprises one, two, three, four, five, six, or seven mutations selected from the group consisting of H8X, R126X, L68X, D108X, N127X, D147X, and E155X in TadA reference sequence, or a corresponding mutation or mutations in another adenosine deaminase, where X indicates the presence of any amino acid other than the corresponding amino acid in the wild-type adenosine deaminase. In some embodiments, the adenosine deaminase comprises one, two, three, four, or five mutations selected from the group consisting of H8X, D108X, A109X, N127X, and E155X in TadA reference sequence, or a corresponding mutation or mutations in another adenosine deaminase, where X indicates the presence of any amino acid other than the corresponding amino acid in the wild-type adenosine deaminase.

[0419] In some embodiments, the adenosine deaminase comprises one, two, three, four, five, or six mutations selected from the group consisting of H8Y, D108N, N127S, D147Y, R152C, and Q154H in TadA reference sequence, or a corresponding mutation or mutations in another adenosine deaminase (e.g., ecTadA). In some embodiments, the adenosine deaminase comprises one, two, three, four, five, six, seven, or eight mutations selected from the group consisting of H8Y, M61I, M70V, D108N, N127S, Q154R, E155G and Q163H in TadA reference sequence, or a corresponding mutation or mutations in another adenosine deaminase (e.g., ecTadA). In some embodiments, the adenosine deaminase comprises one, two, three, four, or five, mutations selected from the group consisting of H8Y, D108N, N127S, E155V, and T166P in TadA reference sequence, or a corresponding mutation or mutations in another adenosine deaminase (e.g., ecTadA). In some embodiments, the adenosine deaminase comprises one, two, three, four, five, or six mutations selected from the group consisting of H8Y, A106T, D108N, N127S, E155D, and K161Q in TadA reference sequence, or a corresponding mutation or mutations in another adenosine deaminase (e.g., ecTadA). In some embodiments, the adenosine deaminase comprises one, two, three, four, five, six, seven, or eight mutations selected from the group consisting of H8Y, R26W, L68Q, D108N, N127S, D147Y, and E155V in TadA reference sequence, or a corresponding mutation or mutations in another adenosine deaminase (e.g., ecTadA). In some embodiments, the adenosine deaminase comprises one, two, three, four, or five, mutations selected from the group consisting of H8Y, D108N, A109T, N127S, and E155G in TadA reference sequence, or a corresponding mutation or mutations in another adenosine deaminase (e.g., ecTadA).

[0420] In some embodiments, the adenosine deaminase comprises one or more of the or one or more corresponding mutations in another adenosine deaminase. In some embodiments, the adenosine deaminase comprises a D108N, D108G, or D108V mutation in TadA reference sequence, or corresponding mutations in another adenosine deaminase. In some embodiments, the adenosine deaminase comprises a A106V and D108N mutation in TadA reference sequence, or corresponding mutations in another adenosine deaminase. In some embodiments, the adenosine deaminase comprises R107C and D108N mutations in TadA reference sequence, or corresponding mutations in another adenosine deaminase. In some embodiments, the adenosine deaminase comprises a H8Y, D108N, N127S, D147Y, and Q154H mutation in TadA reference sequence, or corresponding mutations in another adenosine deaminase. In some embodiments, the adenosine deaminase comprises a H8Y, D108N, N127S, D147Y, and E155V mutation in TadA reference sequence, or corresponding mutations in another adenosine deaminase. In some embodiments, the adenosine deaminase comprises a D108N, D147Y, and E155V mutation in TadA reference sequence, or corresponding mutations in another adenosine deaminase. In some embodiments, the adenosine deaminase comprises a H8Y, D108N, and N127S mutation in TadA reference sequence, or corresponding mutations in another adenosine deaminase. In some embodiments, the adenosine deaminase comprises a A106V, D108N, D147Y, and E155V mutation in TadA reference sequence, or corresponding mutations in another adenosine deaminase (e.g., ecTadA).

[0421] In some embodiments, the adenosine deaminase comprises one or more of S2X, H8X, I49X, L84X, H123X, N127X, I156X, and/or K160X mutation in TadA reference sequence, or one or more corresponding mutations in another adenosine deaminase, where the presence of X indicates any amino acid other than the corresponding amino acid in the wild-type adenosine deaminase. In some embodiments, the adenosine deaminase comprises one or more of S2A, H8Y, I49F, L84F, H123Y, N127S, I156F, and/or K160S mutation in TadA reference sequence, or one or more corresponding mutations in another adenosine deaminase (e.g., ecTadA).

[0422] In some embodiments, the adenosine deaminase comprises an L84X mutation adenosine deaminase, where X indicates any amino acid other than the corresponding amino acid in the wild-type adenosine deaminase. In some embodiments, the adenosine deaminase comprises an L84F mutation in TadA reference sequence, or a corresponding mutation in another adenosine deaminase (e.g., ecTadA).

[0423] In some embodiments, the adenosine deaminase comprises an H123X mutation in TadA reference sequence, or a corresponding mutation in another adenosine deaminase, where X indicates any amino acid other than the corresponding amino acid in the wild-type adenosine deaminase. In some embodiments, the adenosine deaminase comprises an H123Y mutation in TadA reference sequence, or a corresponding mutation in another adenosine deaminase.

[0424] In some embodiments, the adenosine deaminase comprises an I156X mutation in TadA reference sequence, or a corresponding mutation in another adenosine deaminase, where X indicates any amino acid other than the corresponding amino acid in the wild-type adenosine deaminase. In some embodiments, the adenosine deaminase comprises an I156F mutation in TadA reference sequence, or a corresponding mutation in another adenosine deaminase.

[0425] In some embodiments, the adenosine deaminase comprises one, two, three, four, five, six, or seven mutations selected from the group consisting of L84X, A106X, D108X, H123X, D147X, E155X, and I156X in TadA reference sequence, or a corresponding mutation or mutations in another adenosine deaminase, where X indicates the presence of any amino acid other than the corresponding amino acid in the wild-type adenosine deaminase. In some embodiments, the adenosine deaminase comprises one, two, three, four, five, or six mutations selected from the group consisting of S2X, I49X, A106X, D108X, D147X, and E155X in TadA reference sequence, or a corresponding mutation or mutations in another adenosine deaminase, where X indicates the presence of any amino acid other than the corresponding amino acid in the wild-type adenosine deaminase. In some embodiments, the adenosine deaminase comprises one, two, three, four, or five mutations selected from the group consisting of H8X, A106X, D108X, N127X, and K160X in TadA reference sequence, or a corresponding mutation or mutations in another adenosine deaminase, where X indicates the presence of any amino acid other than the corresponding amino acid in the wild-type adenosine deaminase.

[0426] In some embodiments, the adenosine deaminase comprises one, two, three, four, five, six, or seven mutations selected from the group consisting of L84F, A106V, D108N, H123Y, D147Y, E155V, and I156F in TadA reference sequence, or a corresponding mutation or mutations in another adenosine deaminase. In some embodiments, the adenosine deaminase comprises one, two, three, four, five, or six mutations selected from the group consisting of S2A, I49F, A106V, D108N, D147Y, and E155V in TadA reference sequence.

[0427] In some embodiments, the adenosine deaminase comprises one, two, three, four, or five mutations selected from the group consisting of H8Y, A106T, D108N, N127S, and K160S in TadA reference sequence, or a corresponding mutation or mutations in another adenosine deaminase.

[0428] In some embodiments, the adenosine deaminase comprises one or more of a E25X, R26X, R107X, A142X, and/or A143X mutation in TadA reference sequence, or one or more corresponding mutations in another adenosine deaminase, where the presence of X indicates any amino acid other than the corresponding amino acid in the wild-type adenosine deaminase. In some embodiments, the adenosine deaminase comprises one or more of E25M, E25D, E25A, E25R, E25V, E25S, E25Y, R26G, R26N, R26Q, R26C, R26L, R26K, R107P, R107K, R107A, R107N, R107W, R107H, R107S, A142N, A142D, A142G, A143D, A143G, A143E, A143L, A143W, A143M, A143S, A143Q, and/or A143R mutation in TadA reference sequence, or one or more corresponding mutations in another adenosine deaminase. In some embodiments, the adenosine deaminase comprises one or more of the mutations described herein corresponding to TadA reference sequence, or one or more corresponding mutations in another adenosine deaminase.

[0429] In some embodiments, the adenosine deaminase comprises an E25X mutation in TadA reference sequence, or a corresponding mutation in another adenosine deaminase, where X indicates any amino acid other than the corresponding amino acid in the wild-type adenosine deaminase. In some embodiments, the adenosine deaminase comprises an E25M, E25D, E25A, E25R, E25V, E25S, or E25Y mutation in TadA reference sequence, or a corresponding mutation in another adenosine deaminase (e.g., ecTadA).

[0430] In some embodiments, the adenosine deaminase comprises an R26X mutation in TadA reference sequence, or a corresponding mutation in another adenosine deaminase, where X indicates any amino acid other than the corresponding amino acid in the wild-type adenosine deaminase. In some embodiments, the adenosine deaminase comprises R26G, R26N, R26Q, R26C, R26L, or R26K mutation in TadA reference sequence, or a corresponding mutation in another adenosine deaminase (e.g., ecTadA).

[0431] In some embodiments, the adenosine deaminase comprises an R107X mutation in TadA reference sequence, or a corresponding mutation in another adenosine deaminase, where X indicates any amino acid other than the corresponding amino acid in the wild-type adenosine deaminase. In some embodiments, the adenosine deaminase comprises an R107P, R107K, R107A, R107N, R107W, R107H, or R107S mutation in TadA reference sequence, or a corresponding mutation in another adenosine deaminase (e.g., ecTadA).

[0432] In some embodiments, the adenosine deaminase comprises an A142X mutation in TadA reference sequence, or a corresponding mutation in another adenosine deaminase, where X indicates any amino acid other than the corresponding amino acid in the wild-type adenosine deaminase. In some embodiments, the adenosine deaminase comprises an A142N, A142D, A142G, mutation in TadA reference sequence, or a corresponding mutation in another adenosine deaminase (e.g., ecTadA).

[0433] In some embodiments, the adenosine deaminase comprises an A143X mutation in TadA reference sequence, or a corresponding mutation in another adenosine deaminase, where X indicates any amino acid other than the corresponding amino acid in the wild-type adenosine deaminase. In some embodiments, the adenosine deaminase comprises an A143D, A143G, A143E, A143L, A143W, A143M, A143S, A143Q, and/or A143R mutation in TadA reference sequence, or a corresponding mutation in another adenosine deaminase (e.g., ecTadA).

[0434] In some embodiments, the adenosine deaminase comprises one or more of a H36X, N37X, P48X, I49X, R51X, M70X, N72X, D77X, E134X, S146X, Q154X, K157X, and/or K161X mutation in TadA reference sequence, or one or more corresponding mutations in another adenosine deaminase, where the presence of X indicates any amino acid other than the corresponding amino acid in the wild-type adenosine deaminase. In some embodiments, the adenosine deaminase comprises one or more of H36L, N37T, N37S, P48T, P48L, I49V, R51H, R51L, M70L, N72S, D77G, E134G, S146R, S146C, Q154H, K157N, and/or K161T mutation in TadA reference sequence, or one or more corresponding mutations in another adenosine deaminase (e.g., ecTadA).

[0435] In some embodiments, the adenosine deaminase comprises an H36X mutation in TadA reference sequence, or a corresponding mutation in another adenosine deaminase, where X indicates any amino acid other than the corresponding amino acid in the wild-type adenosine deaminase. In some embodiments, the adenosine deaminase comprises an H36L mutation in TadA reference sequence, or a corresponding mutation in another adenosine deaminase.

[0436] In some embodiments, the adenosine deaminase comprises an N37X mutation in TadA reference sequence, or a corresponding mutation in another adenosine deaminase, where X indicates any amino acid other than the corresponding amino acid in the wild-type adenosine deaminase. In some embodiments, the adenosine deaminase comprises an N37T or N37S mutation in TadA reference sequence, or a corresponding mutation in another adenosine deaminase.

[0437] In some embodiments, the adenosine deaminase comprises an P48X mutation in TadA reference sequence, or a corresponding mutation in another adenosine deaminase, where X indicates any amino acid other than the corresponding amino acid in the wild-type adenosine deaminase. In some embodiments, the adenosine deaminase comprises an P48T or P48L mutation in TadA reference sequence, or a corresponding mutation in another adenosine deaminase.

[0438] In some embodiments, the adenosine deaminase comprises an R51X mutation in TadA reference sequence, or a corresponding mutation in another adenosine deaminase, where X indicates any amino acid other than the corresponding amino acid in the wild-type adenosine deaminase. In some embodiments, the adenosine deaminase comprises an R51H or R51L mutation in TadA reference sequence, or a corresponding mutation in another adenosine deaminase.

[0439] In some embodiments, the adenosine deaminase comprises an S146X mutation in TadA reference sequence, or a corresponding mutation in another adenosine deaminase, where X indicates any amino acid other than the corresponding amino acid in the wild-type adenosine deaminase. In some embodiments, the adenosine deaminase comprises an S146R or S146C mutation in TadA reference sequence, or a corresponding mutation in another adenosine deaminase.

[0440] In some embodiments, the adenosine deaminase comprises an K157X mutation in TadA reference sequence, or a corresponding mutation in another adenosine deaminase, where X indicates any amino acid other than the corresponding amino acid in the wild-type adenosine deaminase. In some embodiments, the adenosine deaminase comprises a K157N mutation in TadA reference sequence, or a corresponding mutation in another adenosine deaminase.

[0441] In some embodiments, the adenosine deaminase comprises an P48X mutation in TadA reference sequence, or a corresponding mutation in another adenosine deaminase, where X indicates any amino acid other than the corresponding amino acid in the wild-type adenosine deaminase. In some embodiments, the adenosine deaminase comprises a P48S, P48T, or P48A mutation in TadA reference sequence, or a corresponding mutation in another adenosine deaminase.

[0442] In some embodiments, the adenosine deaminase comprises an A142X mutation in TadA reference sequence, or a corresponding mutation in another adenosine deaminase, where X indicates any amino acid other than the corresponding amino acid in the wild-type adenosine deaminase. In some embodiments, the adenosine deaminase comprises a A142N mutation in TadA reference sequence, or a corresponding mutation in another adenosine deaminase.

[0443] In some embodiments, the adenosine deaminase comprises an W23X mutation in TadA reference sequence, or a corresponding mutation in another adenosine deaminase, where X indicates any amino acid other than the corresponding amino acid in the wild-type adenosine deaminase. In some embodiments, the adenosine deaminase comprises a W23R or W23L mutation in TadA reference sequence, or a corresponding mutation in another adenosine deaminase.

[0444] In some embodiments, the adenosine deaminase comprises an R152X mutation in TadA reference sequence, or a corresponding mutation in another adenosine deaminase, where X indicates any amino acid other than the corresponding amino acid in the wild-type adenosine deaminase. In some embodiments, the adenosine deaminase comprises a R152P or R52H mutation in TadA reference sequence, or a corresponding mutation in another adenosine deaminase.

[0445] In one embodiment, the adenosine deaminase may comprise the mutations H36L, R51L, L84F, A106V, D108N, H123Y, S146C, D147Y, E155V, I156F, and K157N. In some embodiments, the adenosine deaminase comprises the following combination of mutations relative to TadA reference sequence, where each mutation of a combination is separated by a “_” and each combination of mutations is between parentheses:
[0446] (A106V_D108N),
[0447] (R107C_D108N),
[0448] (H8Y_D108N_N127S_D147Y_Q154H),
[0449] (H8Y_D108N_N127S_D147Y_E155V),
[0450] (D108N_D147Y_E155V),
[0451] (H8Y_D108N_N127S),
[0452] (H8Y_D108N_N127S_D147Y_Q154H),
[0453] (A106V_D108N_D147Y_E155V),
[0454] (D108Q_D147Y_E155V),
[0455] (D108M_D147Y_E155V),
[0456] (D108L_D147Y_E155V),
[0457] (D108K_D147Y_E155V),
[0458] (D108I_D147Y_E155V),
[0459] (D108F_D147Y_E155V),
[0460] (A106V_D108N_D147Y),
[0461] (A106V_D108M_D147Y_E155V),
[0462] (E59A_A106V_D108N_D147Y_E155V),
[0463] (E59A cat dead_A106V_D108N_D147Y_E155V),
[0464] (L84F_A106V_D108N_H123Y_D147Y_E155V_I156Y),
[0465] (L84F_A106V_D108N_H123Y_D147Y_E155V_I156F),
[0466] (D103A_D104N),
[0467] (G22P_D103A_D104N),
[0468] (D103A_D104N_S138A),
[0469] (R26G_L84F_A106V_R107H_D108N_H123Y_A142N_A143D_D147Y_E155V_I156F),
[0470] (E25G_R26G_L84F_A106V_R107H_D108N_H123Y_A142N_A143D_D147Y_E155V_I156F),
[0471] (E25D_R26G_L84F_A106V_R107K_D108N_H123Y_A142N_A143G_D147Y_E155V_I156F),
[0472] (R26Q_L84F_A106V_D108N_H123Y_A142N_D147Y_E155V_I156F),
[0473] (E25M_R26G_L84F_A106V_R107P_D108N_H123Y_A142N_A143D_D147Y_E155V_I156F),
[0474] (R26C_L84F_A106V_R107H_D108N_H123Y_A142N_D147Y_E155V_I156F),
[0475] (L84F_A106V_D108N_H123Y_A142N_A143L_D147Y_E155V_I156F),
[0476] (R26G_L84F_A106V_D108N_H123Y_A142N_D147Y_E155V_I156F),
[0477] (E25A_R26G_L84F_A106V_R107N_D108N_H123Y_A142N_A143E_D147Y_E155V_I156F),
[0478] (R26G_L84F_A106V_R107H_D108N_H123Y_A142N_A143D_D147Y_E155V_I156F),
[0479] (A106V_D108N_A142N_D147Y_E155V),
[0480] (R26G_A106V_D108N_A142N_D147Y_E155V),
[0481] (E25D_R26G_A106V_R107K_D108N_A142N_A143G_D147Y_E155V),
[0482] (R26G_A106V_D108N_R107H_A142N_A143D_D147Y_E155V),
[0483] (E25D_R26G_A106V_D108N_A142N_D147Y_E155V),
[0484] (A106V_R107K_D108N_A142N_D147Y_E155V),
[0485] (A106V_D108N_A142N_A143G_D147Y_E155V),
[0486] (A106V_D108N_A142N_A143L_D147Y_E155V),
[0487] (H36L_R51L_L84F_A106V_D108N_H123Y_S146C_D147Y_E155V_I156F_K157N),
[0488] (N37T_P48T_M70L_L84F_A106V_D108N_H123Y_D147Y_I49V_E155V_I156F),
[0489] (N37S_L84F_A106V_D108N_H123Y_D147Y_E155V_I156F_K161T),
[0490] (H36L_L84F_A106V_D108N_H123Y_D147Y_Q154H_E155V_I156F),
[0491] (N72S_L84F_A106V_D108N_H123Y_S146R_D147Y_E155V_I156F),
[0492] (H36L_P48L_L84F_A106V_D108N_H123Y_E134G_D147Y_E155V_I156F),
[0493] (H36L_L84F_A106V_D108N_H123Y_D147Y_E155V_I156F_K157N)
[0494] (H36L_L84F_A106V_D108N_H123Y_S146C_D147Y_E155V_I156F),
[0495] (L84F_A106V_D108N_H123Y_S146R_D147Y_E155V_I156F_K161T),
[0496] (N37S_R51H_D77G_L84F_A106V_D108N_H123Y_D147Y_E155V_I156F),
[0497] (R51L_L84F_A106V_D108N_H123Y_D147Y_E155V_I156F_K157N),
[0498] (D24G_Q71R_L84F_H96L_A106V_D108N_H123Y_D147Y_E155V_I156F_K160E),
[0499] (H36L_G67V_L84F_A106V_D108N_H123Y_S146T_D147Y_E155V_I156F),
[0500] (Q71L_L84F_A106V_D108N_H123Y_L137M_A143E_D147Y_E155V_I156F),
[0501] (E25G_L84F_A106V_D108N_H123Y_D147Y_E155V_I156F_Q159L),
[0502] (L84F_A91T_F104I_A106V_D108N_H123Y_D147Y_E155V_I156F),
[0503] (N72D_L84F_A106V_D108N_H123Y_G125A_D147Y_E155V_I156F),
[0504] (P48S_L84F_S97C_A106V_D108N_H123Y_D147Y_E155V_I156F),
[0505] (W23G_L84F_A106V_D108N_H123Y_D147Y_E155V_I156F),
[0506] (D24G_P48L_Q71R_L84F_A106V_D108N_H123Y_D147Y_E155V_I156F_Q159L),
[0507] (L84F_A106V_D108N_H123Y_A142N_D147Y_E155V_I156F),
[0508] (H36L_R51L_L84F_A106V_D108N_H123Y_A142N_S146C_D147Y_E155V_I156F_K157N),
[0509] (N37S_L84F_A106V_D108N_H123Y_A142N_D147Y_E155V_I156F_K161T),
[0510] (L84F_A106V_D108N_D147Y_E155V_I156F),
[0511] (R51L_L84F_A106V_D108N_H123Y_S146C_D147Y_E155V_I156F_K157N_K161T),
[0512] (L84F_A106V_D108N_H123Y_S146C_D147Y_E155V_I156F_K161T),
[0513] (L84F_A106V_D108N_H123Y_S146C_D147Y_E155V_I156F_K157N_K160E_K161T),
[0514] (L84F_A106V_D108N_H123Y_S146C_D147Y_E155V_I156F_K157N_K160E),
[0515] (R74Q_L84F_A106V_D108N_H123Y_D147Y_E155V_I156F),
[0516] (R74A_L84F_A106V_D108N_H123Y_D147Y_E155V_I156F),
[0517] (L84F_A106V_D108N_H123Y_D147Y_E155V_I156F),
[0518] (R74Q_L84F_A106V_D108N_H123Y_D147Y_E155V_I156F),
[0519] (L84F_R98Q_A106V_D108N_H123Y_D147Y_E155V_I156F),
[0520] (L84F_A106V_D108N_H123Y_R129Q_D147Y_E155V_I156F),
[0521] (P48S_L84F_A106V_D108N_H123Y_A142N_D147Y_E155V_I156F),
[0522] (P48S_A142N),
[0523] (P48T_I49V_L84F_A106V_D108N_H123Y_A142N_D147Y_E155V_I156F_L157N),
[0524] (P48T_I49V_A142N),
[0525] (H36L_P48S_R51L_L84F_A106V_D108N_H123Y_S146C_D147Y_E155V_I156F_K157N),
[0526] (H36L_P48S_R51L_L84F_A106V_D108N_H123Y_S146C_A142N_D147Y_E155V_I156F
[0527] (H36L_P48T_I49V_R51L_L84F_A106V_D108N_H123Y_S146C_D147Y_E155V_I156F_K157N),
[0528] (H36L_P48T_I49V_R51L_L84F_A106V_D108N_H123Y_A142N_S146C_D147Y_E155V_I156F_K157N),
[0529] (H36L_P48A_R51L_L84F_A106V_D108N_H123Y_S146C_D147Y_E155V_I156F_K157N),
[0530] (H36L_P48A_R51L_L84F_A106V_D108N_H123Y_A142N_S146C_D147Y_E155V_I156F_K157N),
[0531] (H36L_P48A_R51L_L84F_A106V_D108N_H123Y_S146C_A142N_D147Y_E155V_I156F_K157N),
[0532] (W23L_H36L_P48A_R51L_L84F_A106V_D108N_H123Y_S146C_D147Y_E155V_I156F_K157N),
[0533] (W23R_H36L_P48A_R51L_L84F_A106V_D108N_H123Y_S146C_D147Y_E155V_I156F_K157N),
[0534] (W23L_H36L_P48A_R51L_L84F_A106V_D108N_H123Y_S146R_D147Y_E155V_I156F_K161T),
[0535] (H36L_P48A_R51L_L84F_A106V_D108N_H123Y_S146C_D147Y_R152H_E155V_I156F_K157N),
[0536] (H36L_P48A_R51L_L84F_A106V_D108N_H123Y_S146C_D147Y_R152P_E155V_I156F_K157N),
[0537] (W23L_H36L_P48A_R51L_L84F_A106V_D108N_H123Y_S146C_D147Y_R152P_E155V_I156F_K157N),
[0538] (W23L_H36L_P48A_R51L_L84F_A106V_D108N_H123Y_A142A_S146C_D147Y_E155V_I156F_K157N),
[0539] (W23L_H36L_P48A_R51L_L84F_A106V_D108N_H123Y_A142A_S146C_D147Y_R152P_E155V_I156F_K157N),
[0540] (W23L_H36L_P48A_R51L_L84F_A106V_D108N_H123Y_S146R_D147Y_E155V_I156F_K161T),
[0541] (W23R_H36L_P48A_R51L_L84F_A106V_D108N_H123Y_S146C_D147Y_R152P_E155V_I156F_K157N),
[0542] (H36L_P48A_R51L_L84F_A106V_D108N_H123Y_A142N_S146C_D147Y_R152P_E155 V_I156F_K157N).

[0543] In some embodiments, the TadA deaminase is TadA variant. In some embodiments, the TadA variant is TadA*7.10. In particular embodiments, the fusion proteins comprise a single TadA*7.10 domain (e.g., provided as a monomer). In other embodiments, the fusion protein comprises TadA*7.10 and TadA(wt), which are capable of forming heterodimers. In one embodiment, a fusion protein of the invention comprises a wild-type TadA linked to TadA*7.10, which is linked to Cas9 nickase.

[0544] In some embodiments, TadA*7.10 comprises at least one alteration. In some embodiments, the adenosine deaminase comprises an alteration in the following sequence:

TadA*7.10
(SEQ ID NO: 8)
MSEVEFSHEYWMRHALTLAKRARDEREVPVGAVLVLNNRVIGEGWNRAIGL
HDPTAHAEIMALRQGGLVMQNYRLIDATLYVTFEPCVMCAGAMIHSRIGRV
VFGVRNAKTGAAGSLMDVLHYPGMNHRVEITEGILADECAALLCYFFRMPR
QVFNAQKKAQSSTD

[0545] In some embodiments, TadA*7.10 comprises an alteration at amino acid 82 and/or 166. In particular embodiments, TadA*7.10 comprises one or more of the following alterations: Y147T, Y147R, Q154S, Y123H, V82S, T166R, and/or Q154R. In other embodiments, a variant of TadA*7.10 comprises a combination of alterations selected from the group of: Y147T+Q154R; Y147T+Q154S; Y147R+Q154S; V82S+Q154S; V82S+Y147R; V82S+Q154R; V82S+Y123H; I76Y+V82S; V82S+Y123H+Y147T; V82S+Y123H+Y147R; V82S+Y123H+Q154R; Y147R+Q154R+Y123H; Y147R+Q154R+I76Y; Y147R+Q154R+T166R; Y123H+Y147R+Q154R+I76Y; V82S+Y123H+Y147R+Q154R; and I76Y+V82S+Y123H+Y147R+Q154R.

[0546] In some embodiments, an adenosine deaminase variant (e.g., TadA*8) comprises a deletion. In some embodiments, an adenosine deaminase variant comprises a deletion of the C terminus. In particular embodiments, an adenosine deaminase variant comprises a deletion of the C terminus beginning at residue 149, 150, 151, 152, 153, 154, 155, 156, and 157, relative to TadA*7.10, the TadA reference sequence, or a corresponding mutation in another TadA.

[0547] In other embodiments, an adenosine deaminase variant (e.g., TadA*8) is a monomer comprising one or more of the following alterations: Y147T, Y147R, Q154S, Y123H, V82S, T166R, and/or Q154R, relative to TadA*7.10, the TadA reference sequence, or a corresponding mutation in another TadA. In other embodiments, the adenosine deaminase variant (TadA*8) is a monomer comprising a combination of alterations selected from the group of: Y147T+Q154R; Y147T+Q154S; Y147R+Q154S; V82S+Q154S; V82S+Y147R; V82S+Q154R; V82S+Y123H; I76Y+V82S; V82S+Y123H+Y147T; V82S+Y123H+Y147R; V82S+Y123H+Q154R; Y147R+Q154R+Y123H; Y147R+Q154R+I76Y; Y147R+Q154R+T166R; Y123H+Y147R+Q154R+I76Y; V82S+Y123H+Y147R+Q154R; and I76Y+V82S+Y123H+Y147R+Q154R, relative to TadA*7.10, the TadA reference sequence, or a corresponding mutation in another TadA.

[0548] In other embodiments, the adenosine deaminase variant is a homodimer comprising two adenosine deaminase domains (e.g., TadA*8) each having one or more of the following alterations Y147T, Y147R, Q154S, Y123H, V82S, T166R, and/or Q154R, relative to TadA*7.10, the TadA reference sequence, or a corresponding mutation in another TadA. In other embodiments, the adenosine deaminase variant is a homodimer comprising two adenosine deaminase domains (e.g., TadA*8) each having a combination of alterations selected from the group of: Y147T+Q154R; Y147T+Q154S; Y147R+Q154S; V82S+Q154S; V82S+Y147R; V82S+Q154R; V82S+Y123H; I76Y+V82S; V82S+Y123H+Y147T; V82S+Y123H+Y147R; V82S+Y123H+Q154R; Y147R+Q154R+Y123H; Y147R+Q154R+I76Y; Y147R+Q154R+T166R; Y123H+Y147R+Q154R+I76Y; V82S+Y123H+Y147R+Q154R; and I76Y+V82S+Y123H+Y147R+Q154R, relative to TadA*7.10, the TadA reference sequence, or a corresponding mutation in another TadA.

[0549] In other embodiments, the adenosine deaminase variant is a heterodimer of a wild-type adenosine deaminase domain and an adenosine deaminase variant domain (e.g., TadA*8) comprising one or more of the following alterations Y147T, Y147R, Q154S, Y123H, V82S, T166R, and/or Q154R, relative to TadA*7.10, the TadA reference sequence, or a corresponding mutation in another TadA. In other embodiments, the adenosine deaminase variant is a heterodimer of a wild-type adenosine deaminase domain and an adenosine deaminase variant domain (e.g., TadA*8) comprising a combination of alterations selected from the group of: Y147T+Q154R; Y147T+Q154S; Y147R+Q154S; V82S+Q154S; V82S+Y147R; V82S+Q154R; V82S+Y123H; I76Y+V82S; V82S+Y123H+Y147T; V82S+Y123H+Y147R; V82S+Y123H+Q154R; Y147R+Q154R+Y123H; Y147R+Q154R+I76Y; Y147R+Q154R+T166R; Y123H+Y147R+Q154R+I76Y; V82S+Y123H+Y147R+Q154R; and I76Y+V82S+Y123H+Y147R+Q154R, relative to TadA*7.10, the TadA reference sequence, or a corresponding mutation in another TadA.

[0550] In other embodiments, the adenosine deaminase variant is a heterodimer of a TadA*7.10 domain and an adenosine deaminase variant domain (e.g., TadA*8) comprising one or more of the following alterations Y147T, Y147R, Q154S, Y123H, V82S, T166R, and/or Q154R, relative to TadA*7.10, the TadA reference sequence, or a corresponding mutation in another TadA. In other embodiments, the adenosine deaminase variant is a heterodimer of a TadA*7.10 domain and an adenosine deaminase variant domain (e.g., TadA*8) comprising a combination of alterations selected from the group of: Y147T+Q154R; Y147T+Q154S; Y147R+Q154S; V82S+Q154S; V82S+Y147R; V82S+Q154R; V82S+Y123H; I76Y+V82S; V82S+Y123H+Y147T; V82S+Y123H+Y147R; V82S+Y123H+Q154R; Y147R+Q154R+Y123H; Y147R+Q154R+I76Y; Y147R+Q154R+T166R; Y123H+Y147R+Q154R+I76Y; V82S+Y123H+Y147R+Q154R; and I76Y+V82S+Y123H+Y147R+Q154R, relative to TadA*7.10, the TadA reference sequence, or a corresponding mutation in another TadA.

[0551] In particular embodiments, an adenosine deaminase heterodimer comprises a TadA*8 domain and an adenosine deaminase domain selected from Staphylococcus aureus (S. aureus) TadA, Bacillus subtilis (B. subtilis) TadA, Salmonella typhimurium (S. typhimurium) TadA, Shewanella putrefaciens (S. putrefaciens) TadA, Haemophilus influenzae F3031 (H. influenzae) TadA, Caulobacter crescentus (C. crescentus) TadA, Geobacter sulfurreducens (G. sulfurreducens) TadA, or TadA*7.10.

[0552] In some embodiments, an adenosine deaminase is a TadA*8. In one embodiment, an adenosine deaminase is a TadA*8 that comprises or consists essentially of the following sequence or a fragment thereof having adenosine deaminase activity:

(SEQ ID NO: 12)
MSEVEFSHEYWMRHALTLAKRARDEREVPVGAVLVLNNRVIGEGWNRAIGL
HDPTAHAEIMALRQGGLVMQNYRLIDATLYVTFEPCVMCAGAMIHSRIGRV
VFGVRNAKTGAAGSLMDVLHYPGMNHRVEITEGILADECAALLCTFFRMPR
QVFNAQKKAQSSTD

[0553] In some embodiments, the TadA*8 is truncated. In some embodiments, the truncated TadA*8 is missing 1, 2, 3, 4, 5, 6, 7, 8, 9, 10, 11, 12, 13, 14, 15, 6, 17, 18, 19, or 20 N-terminal amino acid residues relative to the full length TadA*8. In some embodiments, the truncated TadA*8 is missing 1, 2, 3, 4, 5, 6, 7, 8, 9, 10, 11, 12, 13, 14, 15, 6, 17, 18, 19, or 20 C-terminal amino acid residues relative to the full length TadA*8. In some embodiments the adenosine deaminase variant is a full-length TadA*8.

[0554] In some embodiments the TadA*8 is TadA*8.1, TadA*8.2, TadA*8.3, TadA*8.4, TadA*8.5, TadA*8.6, TadA*8.7, TadA*8.8, TadA*8.9, TadA*8.10, TadA*8.11, TadA*8.12, TadA*8.13, TadA*8.14, TadA*8.15, TadA*8.16, TadA*8.17, TadA*8.18, TadA*8.19, TadA*8.20, TadA*8.21, TadA*8.22, TadA*8.23, or TadA*8.24.

[0555] In other embodiments, a base editor of the disclosure comprising an adenosine deaminase variant (e.g., TadA*8) monomer comprising one or more of the following alterations: R26C, V88A, A109S, T111R, D119N, H122N, Y147D, F149Y, T1661 and/or D167N, relative to TadA*7.10, the TadA reference sequence, or a corresponding mutation in another TadA. In other embodiments, the adenosine deaminase variant (TadA*8) monomer comprises a combination of alterations selected from the group of: R26C+A109S+T111R+D119N+H122N+Y147D+F149Y+T166I+D167N; V88A+A109S+T111R+D119N+H122N+F149Y+T166I+D167N; R26C+A109S+T111R+D119N+H122N+F149Y+T166I+D167N; V88A+T111R+D119N+F149Y; and A109S+T111R+D119N+H122N+Y147D+F149Y+T166I+D167N, relative to TadA*7.10, the TadA reference sequence, or a corresponding mutation in another TadA.

[0556] In other embodiments, a base editor comprises a heterodimer of a wild-type adenosine deaminase domain and an adenosine deaminase variant domain (e.g., TadA*8) comprising one or more of the following alterations R26C, V88A, A109S, T111R, D119N, H122N, Y147D, F149Y, T166I and/or D167N, relative to TadA*7.10, the TadA reference sequence, or a corresponding mutation in another TadA. In other embodiments, the base editor comprises a heterodimer of a wild-type adenosine deaminase domain and an adenosine deaminase variant domain (e.g., TadA*8) comprising a combination of alterations selected from the group of: R26C+A109S+T111R+D119N+H122N+Y147D+F149Y+T166I+D167N; V88A+A109S+T111R+D119N+H122N+F149Y+T166I+D167N; R26C+A109S+T111R+D119N+H122N+F149Y+T166I+D167N; V88A+T111R+D119N+F149Y; and A109S+T111R+D119N+H122N+Y147D+F149Y+T166I+D167N, relative to TadA*7.10, the TadA reference sequence, or a corresponding mutation in another TadA.

[0557] In other embodiments, a base editor comprises a heterodimer of a TadA*7.10 domain and an adenosine deaminase variant domain (e.g., TadA*8) comprising one or more of the following alterations R26C, V88A, A109S, T111R, D119N, H122N, Y147D, F149Y, T166I and/or D167N, relative to TadA*7.10, the TadA reference sequence, or a corresponding mutation in another TadA. In other embodiments, the base editor comprises a heterodimer of a TadA*7.10 domain and an adenosine deaminase variant domain (e.g., TadA*8) comprising a combination of alterations selected from the group of: R26C+A109S+T111R+D119N+H122N+Y147D+F149Y+T166I+D167N; V88A+A109S+T111R+D119N+H122N+F149Y+T166I+D167N; R26C+A109S+T111R+D119N+H122N+F149Y+T166I+D167N; V88A+T111R+D119N+F149Y; and A109S+T111R+D119N+H122N+Y147D+F149Y+T166I+D167N, relative to TadA*7.10, the TadA reference sequence, or a corresponding mutation in another TadA.

[0558] In some embodiments, the TadA*8 is a variant as shown in Table 5. Table 5 shows certain amino acid position numbers in the TadA amino acid sequence and the amino acids present in those positions in the TadA-7.10 adenosine deaminase. Table 5 also shows amino acid changes in TadA variants relative to TadA-7.10 following phage-assisted non-continuous evolution (PANCE) and phage-assisted continuous evolution (PACE), as described in M. Richter et al., 2020, Nature Biotechnology, doi.org/10.1038/s41587-020-0453-z, the entire contents of which are incorporated by reference herein. In some embodiments, the TadA*8 is TadA*8a, TadA*8b, TadA*8c, TadA*8d, or TadA*8e. In some embodiments, the TadA*8 is TadA*8e.

TABLE 5
Select TadA*8 Variants

| | | TadA amino acid number | | | | | | | | | |
|---|---|---|---|---|---|---|---|---|---|---|---|
| | TadA | 26 | 88 | 109 | 111 | 119 | 122 | 147 | 149 | 166 | 167 |
| | TadA-7.10 | R | V | A | T | D | H | Y | F | T | D |
| PANCE 1 | | | | | R | | | | | | |
| PANCE 2 | | | | S/T | R | | | | | | |
| PACE | TadA-8a | C | | S | R | N | N | D | Y | I | N |
| | TadA-8b | | A | S | R | N | N | | Y | I | N |
| | TadA-8c | C | | S | R | N | N | | Y | I | N |
| | TadA-8d | | A | | R | N | | | Y | | |
| | TadA-8e | | | S | R | N | N | D | Y | I | N |

[0559] In one embodiment, a fusion protein of the invention comprises a wild-type TadA is linked to an adenosine deaminase variant described herein (e.g., TadA*8), which is linked to Cas9 nickase. In particular embodiments, the fusion proteins comprise a single TadA*8 domain (e.g., provided as a monomer). In other embodiments, the fusion protein comprises TadA*8 and TadA(wt), which are capable of forming heterodimers.

[0560] In some embodiments, the adenosine deaminase comprises an amino acid sequence that is at least 60%, at least 65%, at least 70%, at least 75%, at least 80%, at least 85%, at least 90%, at least 95%, at least 96%, at least 97%, at least 98%, at least 99%, or at least 99.5% identical to any one of the amino acid sequences set forth in any of the adenosine deaminases provided herein. It should be appreciated that adenosine deaminases provided herein may include one or more mutations (e.g., any of the mutations provided herein). The disclosure provides any deaminase domains with a certain percent identity plus any of the mutations or combinations thereof described herein. In some embodiments, the adenosine deaminase comprises an amino acid sequence that has 1, 2, 3, 4, 5, 6, 7, 8, 9, 10, 11, 12, 13, 14, 15, 16, 17, 18, 19, 20, 21, 22, 21, 24, 25, 26, 27, 28, 29, 30, 31, 32, 33, 34, 35, 36, 37, 38, 39, 40, 41, 42, 43, 44, 45, 46, 47, 48, 49, 50, or more mutations compared to a reference sequence, or any of the adenosine deaminases provided herein. In some embodiments, the adenosine deaminase comprises an amino acid sequence that has at least 5, at least 10, at least 15, at least 20, at least 25, at least 30, at least 35, at least 40, at least 45, at least 50, at least 60, at least 70, at least 80, at least 90, at least 100, at least 110, at least 120, at least 130, at least 140, at least 150, at least 160, or at least 170 identical contiguous amino acid residues as compared to any one of the amino acid sequences known in the art or described herein.

[0561] In particular embodiments, a TadA*8 comprises one or more mutations at any of the following positions shown in bold. In other embodiments, a TadA*8 comprises one or more mutations at any of the positions shown with underlining:

(SEQ ID NO: 8)
MSEVEFSHEY WMRHALTLAK RARDEREVPV GAVLVLNNRV
IGEGWNRAIG ⁵⁰LHDPTAHAEI MALRQGGLVM QNYRLIDATL
YVTFEPCVMC AGAMIHSRIG ¹⁰⁰ RVVFGVRNAK TGAAGSLMDV
LHYPGMNHRV EITEGILADE CAALLCYFFR ¹⁵⁰ MPRQVFNAQK
KAQSSTD

[0562] For example, the TadA*8 comprises alterations at amino acid position 82 and/or 166 (e.g., V82S, T166R) alone or in combination with any one or more of the following Y147T, Y147R, Q154S, Y123H, and/or Q154R, relative to TadA*7.10, the TadA reference sequence, or a corresponding mutation in another TadA. In particular embodiments, a combination of alterations is selected from the group of: Y147T+Q154R; Y147T+Q154S; Y147R+Q154S; V82S+Q154S; V82S+Y147R; V82S+Q154R; V82S+Y123H; I76Y+V82S; V82S+Y123H+Y147T; V82S+Y123H+Y147R; V82S+Y123H+Q154R; Y147R+Q154R+Y123H; Y147R+Q154R+I76Y; Y147R+Q154R+T166R; Y123H+Y147R+Q154R+I76Y; V82S+Y123H+Y147R+Q154R; and I76Y+V82S+Y123H+Y147R+Q154R, relative to TadA*7.10, the TadA reference sequence, or a corresponding mutation in another TadA.

[0563] In some embodiments, the TadA*8 is truncated. In some embodiments, the truncated TadA*8 is missing 1, 2, 3, 4, 5, 6, 7, 8, 9, 10, 11, 12, 13, 14, 15, 6, 17, 18, 19, or 20 N-terminal amino acid residues relative to the full length TadA*8. In some embodiments, the truncated TadA*8 is missing 1, 2, 3, 4, 5, 6, 7, 8, 9, 10, 11, 12, 13, 14, 15, 6, 17, 18, 19, or 20 C-terminal amino acid residues relative to the full length TadA*8. In some embodiments the adenosine deaminase variant is a full-length TadA*8.

[0564] In one embodiment, a fusion protein of the invention comprises a wild-type TadA is linked to an adenosine deaminase variant described herein (e.g., TadA*8), which is linked to Cas9 nickase. In particular embodiments, the fusion proteins comprise a single TadA*8 domain (e.g., provided as a monomer). In other embodiments, the base editor comprises TadA*8 and TadA(wt), which are capable of forming heterodimers.

[0565] In particular embodiments, the fusion proteins comprise a single (e.g., provided as a monomer) TadA*8. In some embodiments, the TadA*8 is linked to a Cas9 nickase. In some embodiments, the fusion proteins of the invention comprise as a heterodimer of a wild-type TadA (TadA(wt)) linked to a TadA*8. In other embodiments, the fusion proteins of the invention comprise as a heterodimer of a TadA*7.10 linked to a TadA*8. In some embodiments, the base editor is ABE8 comprising a TadA*8 variant monomer. In some embodiments, the base editor is ABE8 comprising a heterodimer of a TadA*8 and a TadA(wt). In some embodiments, the base editor is ABE8 comprising a heterodimer of a TadA*8 and TadA*7.10. In some embodiments, the base editor is ABE8 comprising a heterodimer of a TadA*8. In some embodiments, the TadA*8 is selected from Table 11, 13 or 14. In some embodiments, the ABE8 is selected from Table 13, 14 or 16.

[0566] In some embodiments, the adenosine deaminase is a TadA*9 variant. In some embodiments, the adenosine deaminase is a TadA*9 variant selected from the variants described below and with reference to the following sequence (termed TadA*7.10):

(SEQ ID NO: 8)
MSEVEFSHEY WMRHALTLAK RARDEREVPV GAVLVLNNRV
IGEGWNRAIG LHDPTAHAEI MALRQGGLVM QNYRLIDATL
YVTFEPCVMC AGAMIHSRIG RVVFGVRNAK TGAAGSLMDV
LHYPGMNHRV EITEGILADE CAALLCYFFR MPRQVFNAQK
KAQSSTD.

[0567] In some embodiments, an adenosine deaminase comprises one or more of the following alterations: R21N, R23H, E25F, N38G, L51W, P54C, M70V, Q71M, N72K, Y73S, V82T, M94V, P124W, T133K, D139L, D139M, C146R, and A158K. The one or more alternations are shown in the sequence above in underlining and bold font.

[0568] In some embodiments, an adenosine deaminase comprises one or more of the following combinations of alterations: V82S+Q154R+Y147R; V82S+Q154R+Y123H; V82S+Q154R+Y147R+Y123H; Q154R+Y147R+Y123H+I76Y+V82S; V82S+I76Y; V82S+Y147R; V82S+Y147R+Y123H; V82S+Q154R+Y123H; Q154R+Y147R+Y123H+I76Y; V82S+Y147R; V82S+Y147R+Y123H; V82S+Q154R+Y123H; V82S+Q154R+Y147R; V82S+Q154R+Y147R; Q154R+Y147R+Y123H+I76Y; Q154R+Y147R+Y123H+I76Y+V82S; I76Y_V82S_Y123H_Y147R_Q154R; Y147R+Q154R+H123H; and V82S+Q154R.

[0569] In some embodiments, an adenosine deaminase comprises one or more of the following combinations of alterations: E25F+V82S+Y123H, T133K+Y147R+Q154R; E25F+V82S+Y123H+Y147R+Q154R; L51W+V82S+Y123H+C146R+Y147R+Q154R; Y73S+V82S+Y123H+Y147R+Q154R; P54C+V82S+Y123H+Y147R+Q154R; N38G+V82T+Y123H+Y147R+Q154R; N72K+V82S+Y123H+D139L+Y147R+Q154R; E25F+V82S+Y123H+D139M+Y147R+Q154R; Q71M+V82S+Y123H+Y147R+Q154R; E25F+V82S+Y123H+T133K+Y147R+Q154R; E25F+V82S+Y123H+Y147R+Q154R; V82S+Y123H+P124W+Y147R+Q154R; L51W+V82S+Y123H+C146R+Y147R+Q154R; P54C+V82S+Y123H+Y147R+Q154R; Y73S+V82S+Y123H+Y147R+Q154R; N38G+V82T+Y123H+Y147R+Q154R; R23H+V82S+Y123H+Y147R+Q154R; R21N+V82S+Y123H+Y147R+Q154R; V82S+Y123H+Y147R+Q154R+A158K; N72K+V82S+Y123H+D139L+Y147R+Q154R; E25F+V82S+Y123H+D139M+Y147R+Q154R; and M70V+V82S+M94V+Y123H+Y147R+Q154R

[0570] In some embodiments, an adenosine deaminase comprises one or more of the following combinations of alterations: Q71M+V82S+Y123H+Y147R+Q154R; E25F+I76Y+V82S+Y123H+Y147R+Q154R; I76Y+V82T+Y123H+Y147R+Q154R; N38G+I76Y+V82S+Y123H+Y147R+Q154R; R23H+I76Y+V82S+Y123H+Y147R+Q154R; P54C+I76Y+V82S+Y123H+Y147R+Q154R; R21N+I76Y+V82S+Y123H+Y147R+Q154R; I76Y+V82S+Y123H+D139M+Y147R+Q154R; Y73S+I76Y+V82S+Y123H+Y147R+Q154R; E25F+I76Y+V82S+Y123H+Y147R+Q154R; I76Y+V82T+Y123H+Y147R+Q154R; N38G+I76Y+V82S+Y123H+Y147R+Q154R; R23H+I76Y+V82S+Y123H+Y147R+Q154R; P54C+I76Y+V82S+Y123H+Y147R+Q154R; R21N+I76Y+V82S+Y123H+Y147R+Q154R; I76Y+V82S+Y123H+D139M+Y147R+Q154R; Y73S+I76Y+V82S+Y123H+Y147R+Q154R; and V82S+Q154R; N72K_V82S+Y123H+Y147R+Q154R; Q71M_V82S+Y123H+Y147R+Q154R; V82S+Y123H+T133K+Y147R+Q154R; V82S+Y123H+T133K+Y147R+Q154R+A158K; M70V+Q71M+N72K+V82S+Y123H+Y147R+Q154R; N72K_V82S+Y123H+Y147R+Q154R; Q71M_V82S+Y123H+Y147R+Q154R; M70V+V82S+M94V+Y123H+Y147R+Q154R; V82S+Y123H+T133K+Y147R+Q154R; V82S+Y123H+T133K+Y147R+Q154R+A158K; and M70V+Q71M+N72K+V82S+Y123H+Y147R+Q154R. In some embodiments, the adenosine deaminase is expressed as a monomer. In other embodiments, the adenosine deaminase is expressed as a heterodimer. In some embodiments, the deaminase or other polypeptide sequence lacks a methionine, for example when included as a component of a fusion protein. This can alter the numbering of positions. However, the skilled person will understand that such corresponding mutations refer to the same mutation, e.g., Y73S and Y72S and D139M and D138M.

[0571] In some embodiments, the TadA*9 variant comprises the alterations described in Table 17 as described herein. In some embodiments, the TadA*9 variant is a monomer. In some embodiments, the TadA*9 variant is a heterodimer with a wild-type TadA adenosine deaminase. In some embodiments, the TadA*9 variant is a heterodimer with another TadA variant (e.g., TadA*8, TadA*9). Additional details of TadA*9 adenosine deaminases are described in International PCT Application No. PCT/2020/049975, which is incorporated herein by reference for its entirety.

[0572] Any of the mutations provided herein and any additional mutations (e.g., based on the ecTadA amino acid sequence) can be introduced into any other adenosine deaminases. Any of the mutations provided herein can be made individually or in any combination in TadA reference sequence or another adenosine deaminase (e.g., ecTadA).

[0573] Details of A to G nucleobase editing proteins are described in International PCT Application No. PCT/2017/045381 (WO2018/027078) and Gaudelli, N. M., et al., “Programmable base editing of A·T to G·C in genomic DNA without DNA cleavage” Nature, 551, 464-471 (2017), the entire contents of which are hereby incorporated by reference.

### C to T Editing

[0574] In some embodiments, a base editor disclosed herein comprises a fusion protein comprising cytidine deaminase capable of deaminating a target cytidine (C) base of a polynucleotide to produce uridine (U), which has the base pairing properties of thymine. In some embodiments, for example where the polynucleotide is double-stranded (e.g., DNA), the uridine base can then be substituted with a thymidine base (e.g., by cellular repair machinery) to give rise to a C:G to a T:A transition. In other embodiments, deamination of a C to U in a nucleic acid by a base editor cannot be accompanied by substitution of the U to a T.

[0575] The deamination of a target C in a polynucleotide to give rise to a U is a non-limiting example of a type of base editing that can be executed by a base editor described herein. In another example, a base editor comprising a cytidine deaminase domain can mediate conversion of a cytosine (C) base to a guanine (G) base. For example, a U of a polynucleotide produced by deamination of a cytidine by a cytidine deaminase domain of a base editor can be excised from the polynucleotide by a base excision repair mechanism (e.g., by a uracil DNA glycosylase (UDG) domain), producing an abasic site. The nucleobase opposite the abasic site can then be substituted (e.g., by base repair machinery) with another base, such as a C, by for example a translesion polymerase. Although it is typical for a nucleobase opposite an abasic site to be replaced with a C, other substitutions (e.g., A, G or T) can also occur.

[0576] Accordingly, in some embodiments a base editor described herein comprises a deamination domain (e.g., cytidine deaminase domain) capable of deaminating a target C to a U in a polynucleotide. Further, as described below, the base editor can comprise additional domains which facilitate conversion of the U resulting from deamination to, in some embodiments, a T or a G. For example, a base editor comprising a cytidine deaminase domain can further comprise a uracil glycosylase inhibitor (UGI) domain to mediate substitution of a U by a T, completing a C-to-T base editing event. In another example, a base editor can incorporate a translesion polymerase to improve the efficiency of C-to-G base editing, since a translesion polymerase can facilitate incorporation of a C opposite an abasic site (i.e., resulting in incorporation of a G at the abasic site, completing the C-to-G base editing event).

[0577] A base editor comprising a cytidine deaminase as a domain can deaminate a target C in any polynucleotide, including DNA, RNA and DNA-RNA hybrids. Typically, a cytidine deaminase catalyzes a C nucleobase that is positioned in the context of a single-stranded portion of a polynucleotide. In some embodiments, the entire polynucleotide comprising a target C can be single-stranded. For example, a cytidine deaminase incorporated into the base editor can deaminate a target C in a single-stranded RNA polynucleotide. In other embodiments, a base editor comprising a cytidine deaminase domain can act on a double-stranded polynucleotide, but the target C can be positioned in a portion of the polynucleotide which at the time of the deamination reaction is in a single-stranded state. For example, in embodiments where the NAGPB domain comprises a Cas9 domain, several nucleotides can be left unpaired during formation of the Cas9-gRNA-target DNA complex, resulting in formation of a Cas9 “R-loop complex”. These unpaired nucleotides can form a bubble of single-stranded DNA that can serve as a substrate for a single-strand specific nucleotide deaminase enzyme (e.g., cytidine deaminase).

[0578] In some embodiments, a cytidine deaminase of a base editor can comprise all or a portion of an apolipoprotein B mRNA editing complex (APOBEC) family deaminase. APOBEC is a family of evolutionarily conserved cytidine deaminases. Members of this family are C-to-U editing enzymes. The N-terminal domain of APOBEC like proteins is the catalytic domain, while the C-terminal domain is a pseudocatalytic domain. More specifically, the catalytic domain is a zinc dependent cytidine deaminase domain and is important for cytidine deamination. APOBEC family members include APOBEC1, APOBEC2, APOBEC3A, APOBEC3B, APOBEC3C, APOBEC3D (“APOBEC3E” now refers to this), APOBEC3F, APOBEC3G, APOBEC3H, APOBEC4, and Activation-induced (cytidine) deaminase. In some embodiments, a deaminase incorporated into a base editor comprises all or a portion of an APOBEC1 deaminase. In some embodiments, a deaminase incorporated into a base editor comprises all or a portion of APOBEC2 deaminase. In some embodiments, a deaminase incorporated into a base editor comprises all or a portion of is an APOBEC3 deaminase. In some embodiments, a deaminase incorporated into a base editor comprises all or a portion of an APOBEC3A deaminase. In some embodiments, a deaminase incorporated into a base editor comprises all or a portion of APOBEC3B deaminase. In some embodiments, a deaminase incorporated into a base editor comprises all or a portion of APOBEC3C deaminase. In some embodiments, a deaminase incorporated into a base editor comprises all or a portion of APOBEC3D deaminase. In some embodiments, a deaminase incorporated into a base editor comprises all or a portion of APOBEC3E deaminase. In some embodiments, a deaminase incorporated into a base editor comprises all or a portion of APOBEC3F deaminase. In some embodiments, a deaminase incorporated into a base editor comprises all or a portion of APOBEC3G deaminase. In some embodiments, a deaminase incorporated into a base editor comprises all or a portion of APOBEC3H deaminase. In some embodiments, a deaminase incorporated into a base editor comprises all or a portion of APOBEC4 deaminase. In some embodiments, a deaminase incorporated into a base editor comprises all or a portion of activation-induced deaminase (AID). In some embodiments a deaminase incorporated into a base editor comprises all or a portion of cytidine deaminase 1 (CDA1). It should be appreciated that a base editor can comprise a deaminase from any suitable organism (e.g., a human or a rat). In some embodiments, a deaminase domain of a base editor is from a human, chimpanzee, gorilla, monkey, cow, dog, rat, or mouse. In some embodiments, the deaminase domain of the base editor is derived from rat (e.g., rat APOBEC1). In some embodiments, the deaminase domain of the base editor is human APOBEC1. In some embodiments, the deaminase domain of the base editor is pmCDA1.

[0579] Other exemplary deaminases that can be fused to Cas9 according to aspects of this disclosure are provided below. In embodiments, the deaminases are activation-induced deaminases (AID). It should be understood that, in some embodiments, the active domain of the respective sequence can be used, e.g., the domain without a localizing signal (nuclear localization sequence, without nuclear export signal, cytoplasmic localizing signal).

[0580] Some aspects of the present disclosure are based on the recognition that modulating the deaminase domain catalytic activity of any of the fusion proteins described herein, for example by making point mutations in the deaminase domain, affect the processivity of the fusion proteins (e.g., base editors). For example, mutations that reduce, but do not eliminate, the catalytic activity of a deaminase domain within a base editing fusion protein can make it less likely that the deaminase domain will catalyze the deamination of a residue adjacent to a target residue, thereby narrowing the deamination window. The ability to narrow the deamination window can prevent unwanted deamination of residues adjacent to specific target residues, which can decrease or prevent off-target effects.

[0581] For example, in some embodiments, an APOBEC deaminase incorporated into a base editor can comprise one or more mutations selected from the group consisting of H121X, H122X, R126X, R126X, R118X, W90X, W90X, and R132X of rAPOBEC1, or one or more corresponding mutations in another APOBEC deaminase, wherein X is any amino acid. In some embodiments, an APOBEC deaminase incorporated into a base editor can comprise one or more mutations selected from the group consisting of H121R, H122R, R126A, R126E, R118A, W90A, W90Y, and R132E of rAPOBEC1, or one or more corresponding mutations in another APOBEC deaminase. In some embodiments, an APOBEC deaminase incorporated into a base editor can comprise one or more mutations selected from the group consisting of D316X, D317X, R320X, R320X, R313X, W285X, W285X, R326X of hAPOBEC3G, or one or more corresponding mutations in another APOBEC deaminase, wherein X is any amino acid. In some embodiments, any of the fusion proteins provided herein comprise an APOBEC deaminase comprising one or more mutations selected from the group consisting of D316R, D317R, R320A, R320E, R313A, W285A, W285Y, R326E of hAPOBEC3G, or one or more corresponding mutations in another APOBEC deaminase.

[0582] In some embodiments, an APOBEC deaminase incorporated into a base editor can comprise a H121R and a H122R mutation of rAPOBEC1, or one or more corresponding mutations in another APOBEC deaminase. In some embodiments an APOBEC deaminase incorporated into a base editor can comprise an APOBEC deaminase comprising a R126A mutation of rAPOBEC1, or one or more corresponding mutations in another APOBEC deaminase. In some embodiments, an APOBEC deaminase incorporated into a base editor can comprise an APOBEC deaminase comprising a R126E mutation of rAPOBEC1, or one or more corresponding mutations in another APOBEC deaminase. In some embodiments, an APOBEC deaminase incorporated into a base editor can comprise an APOBEC deaminase comprising a R118A mutation of rAPOBEC1, or one or more corresponding mutations in another APOBEC deaminase. In some embodiments, an APOBEC deaminase incorporated into a base editor can comprise an APOBEC deaminase comprising a W90A mutation of rAPOBEC1, or one or more corresponding mutations in another APOBEC deaminase. In some embodiments, an APOBEC deaminase incorporated into a base editor can comprise an APOBEC deaminase comprising a W90Y mutation of rAPOBEC1, or one or more corresponding mutations in another APOBEC deaminase. In some embodiments, an APOBEC deaminase incorporated into a base editor can comprise an APOBEC deaminase comprising a R132E mutation of rAPOBEC1, or one or more corresponding mutations in another APOBEC deaminase. In some embodiments an APOBEC deaminase incorporated into a base editor can comprise an APOBEC deaminase comprising a W90Y and a R126E mutation of rAPOBEC1, or one or more corresponding mutations in another APOBEC deaminase. In some embodiments, an APOBEC deaminase incorporated into a base editor can comprise an APOBEC deaminase comprising a R126E and a R132E mutation of rAPOBEC1, or one or more corresponding mutations in another APOBEC deaminase. In some embodiments, an APOBEC deaminase incorporated into a base editor can comprise an APOBEC deaminase comprising a W90Y and a R132E mutation of rAPOBEC1, or one or more corresponding mutations in another APOBEC deaminase. In some embodiments, an APOBEC deaminase incorporated into a base editor can comprise an APOBEC deaminase comprising a W90Y, R126E, and R132E mutation of rAPOBEC1, or one or more corresponding mutations in another APOBEC deaminase.

[0583] In some embodiments, an APOBEC deaminase incorporated into a base editor can comprise an APOBEC deaminase comprising a D316R and a D317R mutation of hAPOBEC3G, or one or more corresponding mutations in another APOBEC deaminase. In some embodiments, any of the fusion proteins provided herein comprise an APOBEC deaminase comprising a R320A mutation of hAPOBEC3G, or one or more corresponding mutations in another APOBEC deaminase. In some embodiments, an APOBEC deaminase incorporated into a base editor can comprise an APOBEC deaminase comprising a R320E mutation of hAPOBEC3G, or one or more corresponding mutations in another APOBEC deaminase. In some embodiments, an APOBEC deaminase incorporated into a base editor can comprise an APOBEC deaminase comprising a R313A mutation of hAPOBEC3G, or one or more corresponding mutations in another APOBEC deaminase. In some embodiments, an APOBEC deaminase incorporated into a base editor can comprise an APOBEC deaminase comprising a W285A mutation of hAPOBEC3G, or one or more corresponding mutations in another APOBEC deaminase. In some embodiments, an APOBEC deaminase incorporated into a base editor can comprise an APOBEC deaminase comprising a W285Y mutation of hAPOBEC3G, or one or more corresponding mutations in another APOBEC deaminase. In some embodiments, an APOBEC deaminase incorporated into a base editor can comprise an APOBEC deaminase comprising a R326E mutation of hAPOBEC3G, or one or more corresponding mutations in another APOBEC deaminase. In some embodiments, an APOBEC deaminase incorporated into a base editor can comprise an APOBEC deaminase comprising a W285Y and a R320E mutation of hAPOBEC3G, or one or more corresponding mutations in another APOBEC deaminase. In some embodiments, an APOBEC deaminase incorporated into a base editor can comprise an APOBEC deaminase comprising a R320E and a R326E mutation of hAPOBEC3G, or one or more corresponding mutations in another APOBEC deaminase. In some embodiments, an APOBEC deaminase incorporated into a base editor can comprise an APOBEC deaminase comprising a W285Y and a R326E mutation of hAPOBEC3G, or one or more corresponding mutations in another APOBEC deaminase. In some embodiments, an APOBEC deaminase incorporated into a base editor can comprise an APOBEC deaminase comprising a W285Y, R320E, and R326E mutation of hAPOBEC3G, or one or more corresponding mutations in another APOBEC deaminase.

[0584] A number of modified cytidine deaminases are commercially available, including, but not limited to, SaBE3, SaKKH-BE3, VQR-BE3, EQR-BE3, VRER-BE3, YE1-BE3, EE-BE3, YE2-BE3, and YEE-BE3, which are available from Addgene (plasmids 85169, 85170, 85171, 85172, 85173, 85174, 85175, 85176, 85177). In some embodiments, a deaminase incorporated into a base editor comprises all or a portion of an APOBEC1 deaminase.

[0585] Details of C to T nucleobase editing proteins are described in International PCT Application No. PCT/US2016/058344 (WO2017/070632) and Komor, A. C., et al., “Programmable editing of a target base in genomic DNA without double-stranded DNA cleavage” Nature 533, 420-424 (2016), the entire contents of which are hereby incorporated by reference.

### Cytidine Deaminases

[0586] In some embodiments, the fusion proteins of the invention comprise one or more cytidine deaminase domains. In some embodiments, the cytidine deaminases provided herein are capable of deaminating cytosine or 5-methylcytosine to uracil or thymine. In some embodiments, the cytidine deaminases provided herein are capable of deaminating cytosine in DNA. The cytidine deaminase may be derived from any suitable organism. In some embodiments, the cytidine deaminase is a naturally-occurring cytidine deaminase that includes one or more mutations corresponding to any of the mutations provided herein. One of skill in the art will be able to identify the corresponding residue in any homologous protein, e.g., by sequence alignment and determination of homologous residues. Accordingly, one of skill in the art would be able to generate mutations in any naturally-occurring cytidine deaminase that corresponds to any of the mutations described herein. In some embodiments, the cytidine deaminase is from a prokaryote. In some embodiments, the cytidine deaminase is from a bacterium. In some embodiments, the cytidine deaminase is from a mammal (e.g., human).

[0587] In some embodiments, the cytidine deaminase comprises an amino acid sequence that is at least 60%, at least 65%, at least 70%, at least 75%, at least 80%, at least 85%, at least 90%, at least 95%, at least 96%, at least 97%, at least 98%, at least 99%, or at least 99.5% identical to any one of the cytidine deaminase amino acid sequences set forth herein. It should be appreciated that cytidine deaminases provided herein may include one or more mutations (e.g., any of the mutations provided herein). Some embodiments provide a polynucleotide molecule encoding the cytidine deaminase nucleobase editor polypeptide of any previous aspect or as delineated herein. In some embodiments, the polynucleotide is codon optimized.

[0588] The disclosure provides any deaminase domains with a certain percent identity plus any of the mutations or combinations thereof described herein. In some embodiments, the cytidine deaminase comprises an amino acid sequence that has 1, 2, 3, 4, 5, 6, 7, 8, 9, 10, 11, 12, 13, 14, 15, 16, 17, 18, 19, 20, 21, 22, 21, 24, 25, 26, 27, 28, 29, 30, 31, 32, 33, 34, 35, 36, 37, 38, 39, 40, 41, 42, 43, 44, 45, 46, 47, 48, 49, 50, or more mutations compared to a reference sequence, or any of the cytidine deaminases provided herein. In some embodiments, the cytidine deaminase comprises an amino acid sequence that has at least 5, at least 10, at least 15, at least 20, at least 25, at least 30, at least 35, at least 40, at least 45, at least 50, at least 60, at least 70, at least 80, at least 90, at least 100, at least 110, at least 120, at least 130, at least 140, at least 150, at least 160, or at least 170 identical contiguous amino acid residues as compared to any one of the amino acid sequences known in the art or described herein.

[0589] A fusion protein of the invention second protein comprises two or more nucleic acid editing domains.

### Guide Polynucleotides

[0590] A polynucleotide programmable nucleotide binding domain, when in conjunction with a bound guide polynucleotide (e.g., gRNA), can specifically bind to a target polynucleotide sequence (i.e., via complementary base pairing between bases of the bound guide nucleic acid and bases of the target polynucleotide sequence) and thereby localize the base editor to the target nucleic acid sequence desired to be edited. In some embodiments, the target polynucleotide sequence comprises single-stranded DNA or double-stranded DNA. In some embodiments, the target polynucleotide sequence comprises RNA. In some embodiments, the target polynucleotide sequence comprises a DNA-RNA hybrid.

[0591] CRISPR is an adaptive immune system that provides protection against mobile genetic elements (viruses, transposable elements and conjugative plasmids). CRISPR clusters contain spacers, sequences complementary to antecedent mobile elements, and target invading nucleic acids. CRISPR clusters are transcribed and processed into CRISPR RNA (crRNA). In type II CRISPR systems, correct processing of pre-crRNA requires a trans-encoded small RNA (tracrRNA), endogenous ribonuclease 3 (rnc) and a Cas9 protein. The tracrRNA serves as a guide for ribonuclease 3-aided processing of pre-crRNA. Subsequently, Cas9/crRNA/tracrRNA endonucleolytically cleaves linear or circular dsDNA target complementary to the spacer. The target strand not complementary to crRNA is first cut endonucleolytically, and then trimmed 3′-5′ exonucleolytically. In nature, DNA-binding and cleavage typically requires protein and both RNAs. However, single guide RNAs (“sgRNA”, or simply “gRNA”) can be engineered so as to incorporate aspects of both the crRNA and tracrRNA into a single RNA species. See, e.g., Jinek M., Chylinski K., Fonfara I., Hauer M., Doudna J. A., Charpentier E. Science 337:816-821(2012), the entire contents of which is hereby incorporated by reference. Cas9 recognizes a short motif in the CRISPR repeat sequences (the PAM or protospacer adjacent motif) to help distinguish self versus non-self. See e.g., “Complete genome sequence of an M1 strain of Streptococcus pyogenes.” Ferretti, J. J. et al., Natl. Acad. Sci. U.S.A. 98:4658-4663(2001); “CRISPR RNA maturation by trans-encoded small RNA and host factor RNase III.” Deltcheva E. et al., Nature 471:602-607(2011); and “Programmable dual-RNA-guided DNA endonuclease in adaptive bacterial immunity.” Jinek M. et al, Science 337:816-821(2012), the entire contents of each of which are incorporated herein by reference).

[0592] The PAM sequence can be any PAM sequence known in the art. Suitable PAM sequences include, but are not limited to, NGG, NGA, NGC, NGN, NGT, NGCG, NGAG, NGAN, NGNG, NGCN, NGCG, NGTN, NNGRRT, NNNRRT, NNGRR(N), TTTV, TYCV, TYCV, TATV, NNNNGATT, NNAGAAW, or NAAAAC. Y is a pyrimidine; N is any nucleotide base; W is A or T.

[0593] In an embodiment, a guide polynucleotide described herein can be RNA or DNA. In one embodiment, the guide polynucleotide is a gRNA. An RNA/Cas complex can assist in “guiding” a Cas protein to a target DNA. Cas9/crRNA/tracrRNA endonucleolytically cleaves linear or circular dsDNA target complementary to the spacer. The target strand not complementary to crRNA is first cut endonucleolytically, then trimmed 3′-5′ exonucleolytically. In nature, DNA-binding and cleavage typically requires protein and both RNAs. However, single guide RNAs (“sgRNA”, or simply “gRNA”) can be engineered so as to incorporate aspects of both the crRNA and tracrRNA into a single RNA species. See, e.g., Jinek M. et al., Science 337:816-821(2012), the entire contents of which is hereby incorporated by reference.

[0594] In some embodiments, the guide polynucleotide is at least one single guide RNA (“sgRNA” or “gRNA”). In some embodiments, a guide polynucleotide comprises two or more individual polynucleotides, which can interact with one another via for example complementary base pairing (e.g., a dual guide polynucleotide, dual gRNA). For example, a guide polynucleotide can comprise a CRISPR RNA (crRNA) and a trans-activating CRISPR RNA (tracrRNA) or can comprise one or more trans-activating CRISPR RNA (tracrRNA).

[0595] In some embodiments, the guide polynucleotide is at least one tracrRNA. In some embodiments, the guide polynucleotide does not require PAM sequence to guide the polynucleotide-programmable DNA-binding domain (e.g., Cas9 or Cpf1) to the target nucleotide sequence.

[0596] A guide polynucleotide may include natural or non-natural (or unnatural) nucleotides (e.g., peptide nucleic acid or nucleotide analogs). In some cases, the targeting region of a guide nucleic acid sequence can be at least 15, 16, 17, 18, 19, 20, 21, 22, 23, 24, 25, 26, 27, 28, 29, or nucleotides in length. A targeting region of a guide nucleic acid can be between 10-30 nucleotides in length, or between 15-25 nucleotides in length, or between 15-20 nucleotides in length.

[0597] In some embodiments, the base editor provided herein utilizes one or more guide polynucleotide (e.g., multiple gRNA). In some embodiments, a single guide polynucleotide is utilized for different base editors described herein. For example, a single guide polynucleotide can be utilized for a cytidine base editor and an adenosine base editor.

[0598] In some embodiments, the methods described herein can utilize an engineered Cas protein. A guide RNA (gRNA) is a short synthetic RNA composed of a scaffold sequence necessary for Cas-binding and a user-defined ˜20 nucleotide spacer that defines the genomic target to be modified. Exemplary gRNA scaffold sequences are provided in the sequence listing as SEQ ID NOs: 224-230, 223, 3000, and 243-245. Thus, a skilled artisan can change the genomic target of the Cas protein specificity is partially determined by how specific the gRNA targeting sequence is for the genomic target compared to the rest of the genome.

[0599] In other embodiments, a guide polynucleotide can comprise both the polynucleotide targeting portion of the nucleic acid and the scaffold portion of the nucleic acid in a single molecule (i.e., a single-molecule guide nucleic acid). For example, a single-molecule guide polynucleotide can be a single guide RNA (sgRNA or gRNA). Herein the term guide polynucleotide sequence contemplates any single, dual or multi-molecule nucleic acid capable of interacting with and directing a base editor to a target polynucleotide sequence.

[0600] Typically, a guide polynucleotide (e.g., crRNA/trRNA complex or a gRNA) comprises a “polynucleotide-targeting segment” that includes a sequence capable of recognizing and binding to a target polynucleotide sequence, and a “protein-binding segment” that stabilizes the guide polynucleotide within a polynucleotide programmable nucleotide binding domain component of a base editor. In some embodiments, the polynucleotide targeting segment of the guide polynucleotide recognizes and binds to a DNA polynucleotide, thereby facilitating the editing of a base in DNA. In other cases, the polynucleotide targeting segment of the guide polynucleotide recognizes and binds to an RNA polynucleotide, thereby facilitating the editing of a base in RNA. Herein a “segment” refers to a section or region of a molecule, e.g., a contiguous stretch of nucleotides in the guide polynucleotide. A segment can also refer to a region/section of a complex such that a segment can comprise regions of more than one molecule. For example, where a guide polynucleotide comprises multiple nucleic acid molecules, the protein-binding segment of can include all or a portion of multiple separate molecules that are for instance hybridized along a region of complementarity. In some embodiments, a protein-binding segment of a DNA-targeting RNA that comprises two separate molecules can comprise (i) base pairs 40-75 of a first RNA molecule that is 100 base pairs in length; and (ii) base pairs 10-25 of a second RNA molecule that is 50 base pairs in length. The definition of “segment,” unless otherwise specifically defined in a particular context, is not limited to a specific number of total base pairs, is not limited to any particular number of base pairs from a given RNA molecule, is not limited to a particular number of separate molecules within a complex, and can include regions of RNA molecules that are of any total length and can include regions with complementarity to other molecules.

[0601] The guide polynucleotides can be synthesized chemically, synthesized enzymatically, or a combination thereof. For example, the gRNA can be synthesized using standard phosphoramidite-based solid-phase synthesis methods. Alternatively, the gRNA can be synthesized in vitro by operably linking DNA encoding the gRNA to a promoter control sequence that is recognized by a phage RNA polymerase. Examples of suitable phage promoter sequences include T7, T3, SP6 promoter sequences, or variations thereof. In embodiments in which the gRNA comprises two separate molecules (e.g., crRNA and tracrRNA), the crRNA can be chemically synthesized and the tracrRNA can be enzymatically synthesized.

A gRNA molecule can be transcribed in vitro.

[0602] A guide polynucleotide may be expressed, for example, by a DNA that encodes the gRNA, e.g., a DNA vector comprising a sequence encoding the gRNA. The gRNA may be encoded alone or together with an encoded base editor. Such DNA sequences may be introduced into an expression system, e.g., a cell, together or separately. For example, DNA sequences encoding a polynucleotide programmable nucleotide binding domain and a gRNA may be introduced into a cell, each DNA sequence can be part of a separate molecule (e.g., one vector containing the polynucleotide programmable nucleotide binding domain coding sequence and a second vector containing the gRNA coding sequence) or both can be part of a same molecule (e.g., one vector containing coding (and regulatory) sequence for both the polynucleotide programmable nucleotide binding domain and the gRNA). An RNA can be transcribed from a synthetic DNA molecule, e.g., a gBlocks® gene fragment.

[0603] A gRNA or a guide polynucleotide can comprise three regions: a first region at the 5′ end that can be complementary to a target site in a chromosomal sequence, a second internal region that can form a stem loop structure, and a third 3′ region that can be single-stranded. A first region of each gRNA can also be different such that each gRNA guides a fusion protein to a specific target site. Further, second and third regions of each gRNA can be identical in all gRNAs.

[0604] A first region of a gRNA or a guide polynucleotide can be complementary to sequence at a target site in a chromosomal sequence such that the first region of the gRNA can base pair with the target site. In some cases, a first region of a gRNA can comprise from or from about 10 nucleotides to 25 nucleotides (i.e., from 10 nucleotides to nucleotides; or from about 10 nucleotides to about 25 nucleotides; or from 10 nucleotides to about 25 nucleotides; or from about nucleotides to 25 nucleotides) or more. For example, a region of base pairing between a first region of a gRNA and a target site in a chromosomal sequence can be or can be about 10, 11, 12, 13, 14, 15, 16, 17, 18, 19, 20, 22, 23, 24, 25, or more nucleotides in length. Sometimes, a first region of a gRNA can be or can be about 19, 20, or 21 nucleotides in length.

[0605] A gRNA or a guide polynucleotide can also comprise a second region that forms a secondary structure. For example, a secondary structure formed by a gRNA can comprise a stem (or hairpin) and a loop. A length of a loop and a stem can vary. For example, a loop can range from or from about 3 to 10 nucleotides in length, and a stem can range from or from about 6 to base pairs in length. A stem can comprise one or more bulges of 1 to 10 or about 10 nucleotides. The overall length of a second region can range from or from about 16 to 60 nucleotides in length. For example, a loop can be or can be about 4 nucleotides in length and a stem can be or can be about 12 base pairs.

[0606] A gRNA or a guide polynucleotide can also comprise a third region at the 3′ end that can be essentially single-stranded. For example, a third region is sometimes not complementarity to any chromosomal sequence in a cell of interest and is sometimes not complementarity to the rest of a gRNA. Further, the length of a third region can vary. A third region can be more than or more than about 4 nucleotides in length. For example, the length of a third region can range from or from about 5 to 60 nucleotides in length.

[0607] A gRNA or a guide polynucleotide can target any exon or intron of a gene target. In some cases, a guide can target exon 1 or 2 of a gene, in other cases; a guide can target exon 3 or 4 of a gene. In some embodiments, a composition comprises multiple gRNAs that all target the same exon or multiple gRNAs that target different exons. An exon and/or an intron of a gene can be targeted.

[0608] A gRNA or a guide polynucleotide can target a nucleic acid sequence of about 20 nucleotides or less than about 20 nucleotides (e.g., at least about 5, 10, 15, 16, 17, 18, 19, 20, 21, 22, 23, 24, 25, 30 nucleotides), or anywhere between about 1-100 nucleotides (e.g., 5, 10, 15, 16, 17, 18, 19, 20, 21, 22, 23, 24, 25, 30, 40, 50, 60, 70, 80, 90, 100). A target nucleic acid sequence can be or can be about 20 bases immediately 5′ of the first nucleotide of the PAM. A gRNA can target a nucleic acid sequence. A target nucleic acid can be at least or at least about 1-10, 1-20, 1-30, 1-40, 1-50, 1-60, 1-70, 1-80, 1-90, or 1-100 nucleotides.

[0609] Methods for selecting, designing, and validating guide polynucleotides, e.g., gRNAs and targeting sequences are described herein and known to those skilled in the art. For example, to minimize the impact of potential substrate promiscuity of a deaminase domain in the nucleobase editor system (e.g., an AID domain), the number of residues that could unintentionally be targeted for deamination (e.g., off-target C residues that could potentially reside on single strand DNA within the target nucleic acid locus) may be minimized. In addition, software tools can be used to optimize the gRNAs corresponding to a target nucleic acid sequence, e.g., to minimize total off-target activity across the genome. For example, for each possible targeting domain choice using S. pyogenes Cas9, all off-target sequences (preceding selected PAMs, e.g., NAG or NGG) may be identified across the genome that contain up to certain number (e.g., 1, 2, 3, 4, 5, 6, 7, 8, 9, or 10) of mismatched base-pairs. First regions of gRNAs complementary to a target site can be identified, and all first regions (e.g., crRNAs) can be ranked according to its total predicted off-target score; the top-ranked targeting domains represent those that are likely to have the greatest on-target and the least off-target activity. Candidate targeting gRNAs can be functionally evaluated by using methods known in the art and/or as set forth herein.

[0610] As a non-limiting example, target DNA hybridizing sequences in crRNAs of a gRNA for use with Cas9s may be identified using a DNA sequence searching algorithm. gRNA design is carried out using custom gRNA design software based on the public tool cas-offinder as described in Bae S., Park J., & Kim J.-S. Cas-OFFinder: A fast and versatile algorithm that searches for potential off-target sites of Cas9 RNA-guided endonucleases. Bioinformatics 30, 1473-1475 (2014). This software scores guides after calculating their genome-wide off-target propensity. Typically matches ranging from perfect matches to 7 mismatches are considered for guides ranging in length from 17 to 24. Once the off-target sites are computationally-determined, an aggregate score is calculated for each guide and summarized in a tabular output using a web-interface. In addition to identifying potential target sites adjacent to PAM sequences, the software also identifies all PAM adjacent sequences that differ by 1, 2, 3 or more than 3 nucleotides from the selected target sites. Genomic DNA sequences for a target nucleic acid sequence, e.g., a target gene may be obtained and repeat elements may be screened using publicly available tools, for example, the RepeatMasker program. RepeatMasker searches input DNA sequences for repeated elements and regions of low complexity. The output is a detailed annotation of the repeats present in a given query sequence.

[0611] Following identification, first regions of gRNAs, e.g., crRNAs, are ranked into tiers based on their distance to the target site, their orthogonality and presence of 5′ nucleotides for close matches with relevant PAM sequences (for example, a 5′ G based on identification of close matches in the human genome containing a relevant PAM e.g., NGG PAM for S. pyogenes, NNGRRT or NNGRRV PAM for S. aureus). As used herein, orthogonality refers to the number of sequences in the human genome that contain a minimum number of mismatches to the target sequence. A “high level of orthogonality” or “good orthogonality” may, for example, refer to 20-mer targeting domains that have no identical sequences in the human genome besides the intended target, nor any sequences that contain one or two mismatches in the target sequence. Targeting domains with good orthogonality may be selected to minimize off-target DNA cleavage.

[0612] A gRNA can then be introduced into a cell or embryo as an RNA molecule or a non-RNA nucleic acid molecule, e.g., DNA molecule. In one embodiment, a DNA encoding a gRNA is operably linked to promoter control sequence for expression of the gRNA in a cell or embryo of interest. A RNA coding sequence can be operably linked to a promoter sequence that is recognized by RNA polymerase III (Pol III). Plasmid vectors that can be used to express gRNA include, but are not limited to, px330 vectors and px333 vectors. In some cases, a plasmid vector (e.g., px333 vector) can comprise at least two gRNA-encoding DNA sequences. Further, a vector can comprise additional expression control sequences (e.g., enhancer sequences, Kozak sequences, polyadenylation sequences, transcriptional termination sequences, etc.), selectable marker sequences (e.g., GFP or antibiotic resistance genes such as puromycin), origins of replication, and the like. A DNA molecule encoding a gRNA can also be linear. A DNA molecule encoding a gRNA or a guide polynucleotide can also be circular.

[0613] In some embodiments, a reporter system is used for detecting base-editing activity and testing candidate guide polynucleotides. In some embodiments, a reporter system comprises a reporter gene based assay where base editing activity leads to expression of the reporter gene. For example, a reporter system may include a reporter gene comprising a deactivated start codon, e.g., a mutation on the template strand from 3′-TAC-S′ to 3′-CAC-S′. Upon successful deamination of the target C, the corresponding mRNA will be transcribed as 5′-AUG-3′ instead of 5′-GUG-3′, enabling the translation of the reporter gene. Suitable reporter genes will be apparent to those of skill in the art. Non-limiting examples of reporter genes include gene encoding green fluorescence protein (GFP), red fluorescence protein (RFP), luciferase, secreted alkaline phosphatase (SEAP), or any other gene whose expression are detectable and apparent to those skilled in the art. The reporter system can be used to test many different gRNAs, e.g., in order to determine which residue(s) with respect to the target DNA sequence the respective deaminase will target. sgRNAs that target non-template strand can also be tested in order to assess off-target effects of a specific base editing protein, e.g., a Cas9 deaminase fusion protein. In some embodiments, such gRNAs can be designed such that the mutated start codon will not be base-paired with the gRNA. The guide polynucleotides can comprise standard ribonucleotides, modified ribonucleotides (e.g., pseudouridine), ribonucleotide isomers, and/or ribonucleotide analogs. In some embodiments, the guide polynucleotide can comprise at least one detectable label. The detectable label can be a fluorophore (e.g., FAM, TMR, Cy3, Cy5, Texas Red, Oregon Green, Alexa Fluors, Halo tags, or suitable fluorescent dye), a detection tag (e.g., biotin, digoxigenin, and the like), quantum dots, or gold particles.

[0614] In some embodiments, a base editor system may comprise multiple guide polynucleotides, e.g., gRNAs. For example, the gRNAs may target to one or more target loci (e.g., at least 1 gRNA, at least 2 gRNA, at least 5 gRNA, at least 10 gRNA, at least 20 gRNA, at least 30 g RNA, at least 50 gRNA) comprised in a base editor system. The multiple gRNA sequences can be tandemly arranged and are preferably separated by a direct repeat.

[0615] A guide polynucleotide can comprise one or more modifications to provide a nucleic acid with a new or enhanced feature. A guide polynucleotide can comprise a nucleic acid affinity tag. A guide polynucleotide can comprise synthetic nucleotide, synthetic nucleotide analog, nucleotide derivatives, and/or modified nucleotides.

[0616] In some cases, a gRNA or a guide polynucleotide can comprise modifications. A modification can be made at any location of a gRNA or a guide polynucleotide. More than one modification can be made to a single gRNA or a guide polynucleotide. A gRNA or a guide polynucleotide can undergo quality control after a modification. In some cases, quality control can include PAGE, HPLC, MS, or any combination thereof.

[0617] A modification of a gRNA or a guide polynucleotide can be a substitution, insertion, deletion, chemical modification, physical modification, stabilization, purification, or any combination thereof.

[0618] A gRNA or a guide polynucleotide can also be modified by 5′ adenylate, 5′ guanosine-triphosphate cap, 5′ N7-Methylguanosine-triphosphate cap, 5′ triphosphate cap, 3′ phosphate, 3′ thiophosphate, 5′ phosphate, 5′ thiophosphate, Cis-Syn thymidine dimer, trimers, C12 spacer, C3 spacer, C6 spacer, dSpacer, PC spacer, rSpacer, Spacer 18, Spacer 9, 3′-3′ modifications, 5′-5′ modifications, abasic, acridine, azobenzene, biotin, biotin BB, biotin TEG, cholesteryl TEG, desthiobiotin TEG, DNP TEG, DNP-X, DOTA, dT-Biotin, dual biotin, PC biotin, psoralen C2, psoralen C6, TINA, 3′ DABCYL, black hole quencher 1, black hole quencer 2, DABCYL SE, dT-DABCYL, IRDye QC-1, QSY-21, QSY-35, QSY-7, QSY-9, carboxyl linker, thiol linkers, 2′-deoxyribonucleoside analog purine, 2′-deoxyribonucleoside analog pyrimidine, ribonucleoside analog, 2′-O-methyl ribonucleoside analog, sugar modified analogs, wobble/universal bases, fluorescent dye label, 2′-fluoro RNA, 2′-O-methyl RNA, methylphosphonate, phosphodiester DNA, phosphodiester RNA, phosphothioate DNA, phosphorothioate RNA, UNA, pseudouridine-5′-triphosphate, 5′-methylcytidine-5′-triphosphate, or any combination thereof.

[0619] In some cases, a modification is permanent. In other cases, a modification is transient. In some cases, multiple modifications are made to a gRNA or a guide polynucleotide. A gRNA or a guide polynucleotide modification can alter physiochemical properties of a nucleotide, such as their conformation, polarity, hydrophobicity, chemical reactivity, base-pairing interactions, or any combination thereof.

[0620] A guide polynucleotide can be transferred into a cell by transfecting the cell with an isolated gRNA or a plasmid DNA comprising a sequence coding for the guide RNA and a promoter. A gRNA or a guide polynucleotide can also be transferred into a cell in other way, such as using virus-mediated gene delivery. A gRNA or a guide polynucleotide can be isolated. For example, a gRNA can be transfected in the form of an isolated RNA into a cell or organism. A gRNA can be prepared by in vitro transcription using any in vitro transcription system known in the art. A gRNA can be transferred to a cell in the form of isolated RNA rather than in the form of plasmid comprising encoding sequence for a gRNA.

[0621] A modification can also be a phosphorothioate substitute. In some cases, a natural phosphodiester bond can be susceptible to rapid degradation by cellular nucleases and; a modification of internucleotide linkage using phosphorothioate (PS) bond substitutes can be more stable towards hydrolysis by cellular degradation. A modification can increase stability in a gRNA or a guide polynucleotide. A modification can also enhance biological activity. In some cases, a phosphorothioate enhanced RNA gRNA can inhibit RNase A, RNase T1, calf serum nucleases, or any combinations thereof. These properties can allow the use of PS-RNA gRNAs to be used in applications where exposure to nucleases is of high probability in vivo or in vitro. For example, phosphorothioate (PS) bonds can be introduced between the last 3-5 nucleotides at the 5′- or “-end of a gRNA which can inhibit exonuclease degradation. In some cases, phosphorothioate bonds can be added throughout an entire gRNA to reduce attack by endonucleases.

[0622] In some embodiments, the guide RNA is designed to disrupt a splice site (i.e., a splice acceptor (SA) or a splice donor (SD). In some embodiments, the guide RNA is designed such that the base editing results in a premature STOP codon.

### Protospacer Adjacent Motif

[0623] The term “protospacer adjacent motif (PAM)” or PAM-like motif refers to a 2-6 base pair DNA sequence immediately following the DNA sequence targeted by the Cas9 nuclease in the CRISPR bacterial adaptive immune system. In some embodiments, the PAM can be a 5′ PAM (i.e., located upstream of the 5′ end of the protospacer). In other embodiments, the PAM can be a 3′ PAM (i.e., located downstream of the 5′ end of the protospacer). The PAM sequence is essential for target binding, but the exact sequence depends on a type of Cas protein. The PAM sequence can be any PAM sequence known in the art. Suitable PAM sequences include, but are not limited to, NGG, NGA, NGC, NGN, NGT, NGTT, NGCG, NGAG, NGAN, NGNG, NGCN, NGCG, NGTN, NNGRRT, NNNRRT, NNGRR(N), TTTV, TYCV, TYCV, TATV, NNNNGATT, NNAGAAW, or NAAAAC. Y is a pyrimidine; N is any nucleotide base; W is A or T.

[0624] A base editor provided herein can comprise a CRISPR protein-derived domain that is capable of binding a nucleotide sequence that contains a canonical or non-canonical protospacer adjacent motif (PAM) sequence. A PAM site is a nucleotide sequence in proximity to a target polynucleotide sequence. Some aspects of the disclosure provide for base editors comprising all or a portion of CRISPR proteins that have different PAM specificities.

[0625] For example, typically Cas9 proteins, such as Cas9 from S. pyogenes (spCas9), require a canonical NGG PAM sequence to bind a particular nucleic acid region, where the “N” in “NGG” is adenine (A), thymine (T), guanine (G), or cytosine (C), and the G is guanine. A PAM can be CRISPR protein-specific and can be different between different base editors comprising different CRISPR protein-derived domains. A PAM can be 5′ or 3′ of a target sequence. A PAM can be upstream or downstream of a target sequence. A PAM can be 1, 2, 3, 4, 5, 6, 7, 8, 9, 10 or more nucleotides in length. Often, a PAM is between 2-6 nucleotides in length.

[0626] In some embodiments, the PAM is an “NRN” PAM where the “N” in “NRN” is adenine (A), thymine (T), guanine (G), or cytosine (C), and the R is adenine (A) or guanine (G); or the PAM is an “NYN” PAM, wherein the “N” in NYN is adenine (A), thymine (T), guanine (G), or cytosine (C), and the Y is cytidine (C) or thymine (T), for example, as described in R. T. Walton et al., 2020, Science, 10.1126/science.aba8853 (2020), the entire contents of which are incorporated herein by reference.

[0627] Several PAM variants are described in Table 6 below.

TABLE 6
Cas9 proteins and corresponding PAM sequences

| Variant | PAM |
|---|---|
| spCas9 | NGG |
| spCas9-VRQR | NGA |
| spCas9-VRER | NGCG |
| xCas9 (sp) | NGN |
| saCas9 | NNGRRT |
| saCas9-KKH | NNNRRT |
| spCas9-MQKSER | NGCG |
| spCas9-MQKSER | NGCN |
| spCas9-LRKIQK | NGTN |
| spCas9-LRVSQK | NGTN |
| spCas9-LRVSQL | NGTN |
| spCas9-MQKFRAER | NGC |
| Cpf1 | 5′ (TTTV) |
| SpyMac | 5′-NAA-3′ |

[0628] In some embodiments, the PAM is NGC. In some embodiments, the NGC PAM is recognized by a Cas9 variant. In some embodiments, the NGC PAM variant includes one or more amino acid substitutions selected from D1135M, S1136Q, G1218K, E1219F, A1322R, D1332A, R1335E, and T1337R (collectively termed “MQKFRAER”).

[0629] In some embodiments, the PAM is NGT. In some embodiments, the NGT PAM is recognized by a Cas9 variant. In some embodiments, the NGT PAM variant is generated through targeted mutations at one or more residues 1335, 1337, 1135, 1136, 1218, and/or 1219. In some embodiments, the NGT PAM variant is created through targeted mutations at one or more residues 1219, 1335, 1337, 1218. In some embodiments, the NGT PAM variant is created through targeted mutations at one or more residues 1135, 1136, 1218, 1219, and 1335. In some embodiments, the NGT PAM variant is selected from the set of targeted mutations provided in Tables 7A and 7B below.

TABLE 7A
NGT PAM Variant Mutations at residues 1219, 1335, 1337, 1218

| Variant | E1219V | R1335Q | T1337 | G1218 |
|---|---|---|---|---|
| 1 | F | V | T | |
| 2 | F | V | R | |
| 3 | F | V | Q | |
| 4 | F | V | L | |
| 5 | F | V | T | R |
| 6 | F | V | R | R |
| 7 | F | V | Q | R |
| 8 | F | V | L | R |
| 9 | L | L | T | |
| 10 | L | L | R | |
| 11 | L | L | Q | |
| 12 | L | L | L | |
| 13 | F | I | T | |
| 14 | F | I | R | |
| 15 | F | I | Q | |
| 16 | F | I | L | |
| 17 | F | G | C | |
| 18 | H | L | N | |
| 19 | F | G | C | A |
| 20 | H | L | N | V |
| 21 | L | A | W | |
| 22 | L | A | F | |
| 23 | L | A | Y | |
| 24 | I | A | W | |
| 25 | I | A | F | |
| 26 | I | A | Y | |

TABLE 7B
NGT PAM Variant Mutations at residues 1135, 1136, 1218, 1219,
and 1335

| Variant | D1135L | S1136R | G1218S | E1219V | R1335Q |
|---|---|---|---|---|---|
| 27 | G | | | | |
| 28 | V | | | | |
| 29 | I | | | | |
| 30 | | A | | | |
| 31 | | W | | | |
| 32 | | H | | | |
| 33 | | K | | | |
| 34 | | | K | | |
| 35 | | | R | | |
| 36 | | | Q | | |
| 37 | | | T | | |
| 38 | | | N | | |
| 39 | | | | I | |
| 40 | | | | A | |
| 41 | | | | N | |
| 42 | | | | Q | |
| 43 | | | | G | |
| 44 | | | | L | |
| 45 | | | | S | |
| 46 | | | | T | |
| 47 | | | | | L |
| 48 | | | | | I |
| 49 | | | | | V |
| 50 | | | | | N |
| 51 | | | | | S |
| 52 | | | | | T |
| 53 | | | | | F |
| 54 | | | | | Y |
| 55 | N1286Q | I1331F | | | |

[0630] In some embodiments, the NGT PAM variant is selected from variant 5, 7, 28, 31, or 36 in Table 7A and Table 7B. In some embodiments, the variants have improved NGT PAM recognition.

[0631] In some embodiments, the NGT PAM variants have mutations at residues 1219, 1335, 1337, and/or 1218. In some embodiments, the NGT PAM variant is selected with mutations for improved recognition from the variants provided in Table 8 below.

TABLE 8
NGT PAM Variant Mutations at residues 1219, 1335, 1337, and 1218

| Variant | E1219V | R1335Q | T1337 | G1218 |
|---|---|---|---|---|
| 1 | F | V | T | |
| 2 | F | V | R | |
| 3 | F | V | Q | |
| 4 | F | V | L | |
| 5 | F | V | T | R |
| 6 | F | V | R | R |
| 7 | F | V | Q | R |
| 8 | F | V | L | R |

[0632] In some embodiments, the NGT PAM is selected from the variants provided in Table 9 below.

TABLE 9
NGT PAM variants

| | NGTN | | | | | | | |
|---|---|---|---|---|---|---|---|---|
| | variant | D1135 | S1136 | G1218 | E1219 | A1322R | R1335 | T1337 |
| Variant 1 | LRKIQK | L | R | K | I | — | Q | K |
| Variant 2 | LRSVQK | L | R | S | V | — | Q | K |
| Variant 3 | LRSVQL | L | R | S | V | — | Q | L |
| Variant 4 | LRKIRQK | L | R | K | I | R | Q | K |
| Variant 5 | LRSVRQK | L | R | S | V | R | Q | K |
| Variant 6 | LRSVRQL | L | R | S | V | R | Q | L |

[0633] In some embodiments the NGTN variant is variant 1. In some embodiments, the NGTN variant is variant 2. In some embodiments, the NGTN variant is variant 3. In some embodiments, the NGTN variant is variant 4. In some embodiments, the NGTN variant is variant 5. In some embodiments, the NGTN variant is variant 6.

[0634] In some embodiments, the Cas9 domain is a Cas9 domain from Streptococcus pyogenes (SpCas9). In some embodiments, the SpCas9 domain is a nuclease active SpCas9, a nuclease inactive SpCas9 (SpCas9d), or a SpCas9 nickase (SpCas9n). In some embodiments, the SpCas9 comprises a D9X mutation, or a corresponding mutation in any of the amino acid sequences provided herein, wherein X is any amino acid except for D. In some embodiments, the SpCas9 comprises a D9A mutation, or a corresponding mutation in any of the amino acid sequences provided herein. In some embodiments, the SpCas9 domain, the SpCas9d domain, or the SpCas9n domain can bind to a nucleic acid sequence having a non-canonical PAM. In some embodiments, the SpCas9 domain, the SpCas9d domain, or the SpCas9n domain can bind to a nucleic acid sequence having an NGG, a NGA, or a NGCG PAM sequence.

[0635] In some embodiments, the SpCas9 domain comprises one or more of a D1135X, a R1335X, and a T1337X mutation, or a corresponding mutation in any of the amino acid sequences provided herein, wherein X is any amino acid. In some embodiments, the SpCas9 domain comprises one or more of a D1135E, R1335Q, and T1337R mutation, or a corresponding mutation in any of the amino acid sequences provided herein. In some embodiments, the SpCas9 domain comprises a D1135E, a R1335Q, and a T1337R mutation, or corresponding mutations in any of the amino acid sequences provided herein. In some embodiments, the SpCas9 domain comprises one or more of a D1135X, a R1335X, and a T1337X mutation, or a corresponding mutation in any of the amino acid sequences provided herein, wherein X is any amino acid. In some embodiments, the SpCas9 domain comprises one or more of a D1135V, a R1335Q, and a T1337R mutation, or a corresponding mutation in any of the amino acid sequences provided herein. In some embodiments, the SpCas9 domain comprises a D1135V, a R1335Q, and a T1337R mutation, or corresponding mutations in any of the amino acid sequences provided herein. In some embodiments, the SpCas9 domain comprises one or more of a D1135X, a G1218X, a R1335X, and a T1337X mutation, or a corresponding mutation in any of the amino acid sequences provided herein, wherein X is any amino acid. In some embodiments, the SpCas9 domain comprises one or more of a D1135V, a G1218R, a R1335Q, and a T1337R mutation, or a corresponding mutation in any of the amino acid sequences provided herein. In some embodiments, the SpCas9 domain comprises a D1135V, a G1218R, a R1335Q, and a T1337R mutation, or corresponding mutations in any of the amino acid sequences provided herein.

[0636] In some examples, a PAM recognized by a CRISPR protein-derived domain of a base editor disclosed herein can be provided to a cell on a separate oligonucleotide to an insert (e.g., an AAV insert) encoding the base editor. In such embodiments, providing PAM on a separate oligonucleotide can allow cleavage of a target sequence that otherwise would not be able to be cleaved, because no adjacent PAM is present on the same polynucleotide as the target sequence.

[0637] In an embodiment, S. pyogenes Cas9 (SpCas9) can be used as a CRISPR endonuclease for genome engineering. However, others can be used. In some embodiments, a different endonuclease can be used to target certain genomic targets. In some embodiments, synthetic SpCas9-derived variants with non-NGG PAM sequences can be used. Additionally, other Cas9 orthologues from various species have been identified and these “non-SpCas9s” can bind a variety of PAM sequences that can also be useful for the present disclosure. For example, the relatively large size of SpCas9 (approximately 4 kb coding sequence) can lead to plasmids carrying the SpCas9 cDNA that cannot be efficiently expressed in a cell. Conversely, the coding sequence for Staphylococcus aureus Cas9 (SaCas9) is approximately 1 kilobase shorter than SpCas9, possibly allowing it to be efficiently expressed in a cell. Similar to SpCas9, the SaCas9 endonuclease is capable of modifying target genes in mammalian cells in vitro and in mice in vivo. In some embodiments, a Cas protein can target a different PAM sequence. In some embodiments, a target gene can be adjacent to a Cas9 PAM, 5′-NGG, for example. In other embodiments, other Cas9 orthologs can have different PAM requirements. For example, other PAMs such as those of S. thermophilus (5′-NNAGAA for CRISPR1 and 5′-NGGNG for CRISPR3) and Neisseria meningitidis (5′-NNNNGATT) can also be found adjacent to a target gene.

[0638] In some embodiments, for a S. pyogenes system, a target gene sequence can precede (i.e., be 5′ to) a 5′-NGG PAM, and a 20-nt guide RNA sequence can base pair with an opposite strand to mediate a Cas9 cleavage adjacent to a PAM. In some embodiments, an adjacent cut can be or can be about 3 base pairs upstream of a PAM. In some embodiments, an adjacent cut can be or can be about 10 base pairs upstream of a PAM. In some embodiments, an adjacent cut can be or can be about 0-20 base pairs upstream of a PAM. For example, an adjacent cut can be next to, 1, 2, 3, 4, 5, 6, 7, 8, 9, 10, 11, 12, 13, 14, 15, 16, 17, 18, 19, 20, 21, 22, 23, 24, 25, 26, 27, 28, 29, or 30 base pairs upstream of a PAM. An adjacent cut can also be downstream of a PAM by 1 to 30 base pairs. The sequences of exemplary SpCas9 proteins capable of binding a PAM sequence follow:

[0639] In some embodiments, engineered SpCas9 variants are capable of recognizing protospacer adjacent motif (PAM) sequences flanked by a 3′ H (non-G PAM) (see Tables 2A-2D). In some embodiments, the SpCas9 variants recognize NRNH PAMs (where R is A or G and H is A, C or T). In some embodiments, the non-G PAM is NRRH, NRTH, or NRCH (see e.g., Miller, S. M., et al. Continuous evolution of SpCas9 variants compatible with non-G PAMs, Nat. Biotechnol. (2020), the contents of which is incorporated herein by reference in its entirety).

[0640] In some embodiments, the Cas9 domain is a recombinant Cas9 domain. In some embodiments, the recombinant Cas9 domain is a SpyMacCas9 domain. In some embodiments, the SpyMacCas9 domain is a nuclease active SpyMacCas9, a nuclease inactive SpyMacCas9 (SpyMacCas9d), or a SpyMacCas9 nickase (SpyMacCas9n). In some embodiments, the SaCas9 domain, the SaCas9d domain, or the SaCas9n domain can bind to a nucleic acid sequence having a non-canonical PAM. In some embodiments, the SpyMacCas9 domain, the SpCas9d domain, or the SpCas9n domain can bind to a nucleic acid sequence having a NAA PAM sequence.

[0641] The sequence of an exemplary Cas9 A homolog of Spy Cas9 in Streptococcus macacae with native 5′-NAAN-3′ PAM specificity is known in the art and described, for example, by Jakimo et al., (www.biorxiv.org/content/biorxiv/early/2018/09/27/429654.full.pdf), and is in the Sequence Listing as SEQ ID NO: 1307.

[0642] In some embodiments, a variant Cas9 protein harbors, H840A, P475A, W476A, N477A, D1125A, W1126A, and D1218A mutations such that the polypeptide has a reduced ability to cleave a target DNA or RNA. Such a Cas9 protein has a reduced ability to cleave a target DNA (e.g., a single stranded target DNA) but retains the ability to bind a target DNA (e.g., a single stranded target DNA). As another non-limiting example, in some embodiments, the variant Cas9 protein harbors D10A, H840A, P475A, W476A, N477A, D1125A, W1126A, and D1218A mutations such that the polypeptide has a reduced ability to cleave a target DNA. Such a Cas9 protein has a reduced ability to cleave a target DNA (e.g., a single stranded target DNA) but retains the ability to bind a target DNA (e.g., a single stranded target DNA). In some embodiments, when a variant Cas9 protein harbors W476A and W1126A mutations or when the variant Cas9 protein harbors P475A, W476A, N477A, D1125A, W1126A, and D1218A mutations, the variant Cas9 protein does not bind efficiently to a PAM sequence. Thus, in some such cases, when such a variant Cas9 protein is used in a method of binding, the method does not require a PAM sequence. In other words, in some embodiments, when such a variant Cas9 protein is used in a method of binding, the method can include a guide RNA, but the method can be performed in the absence of a PAM sequence (and the specificity of binding is therefore provided by the targeting segment of the guide RNA). Other residues can be mutated to achieve the above effects (i.e., inactivate one or the other nuclease portions). As non-limiting examples, residues D10, G12, G17, E762, H840, N854, N863, H982, H983, A984, D986, and/or A987 can be altered (i.e., substituted). Also, mutations other than alanine substitutions are suitable.

[0643] In some embodiments, a CRISPR protein-derived domain of a base editor can comprise all or a portion of a Cas9 protein with a canonical PAM sequence (NGG). In other embodiments, a Cas9-derived domain of a base editor can employ a non-canonical PAM sequence. Such sequences have been described in the art and would be apparent to the skilled artisan. For example, Cas9 domains that bind non-canonical PAM sequences have been described in Kleinstiver, B. P., et al., “Engineered CRISPR-Cas9 nucleases with altered PAM specificities” Nature 523, 481-485 (2015); and Kleinstiver, B. P., et al., “Broadening the targeting range of Staphylococcus aureus CRISPR-Cas9 by modifying PAM recognition” Nature Biotechnology 33, 1293-1298 (2015); R. T. Walton et al. “Unconstrained genome targeting with near-PAMless engineered CRISPR-Cas9 variants” Science 10.1126/science.aba8853 (2020); Hu et al. “Evolved Cas9 variants with broad PAM compatibility and high DNA specificity,” Nature, 2018 Apr. 5, 556(7699), 57-63; Miller et al., “Continuous evolution of SpCas9 variants compatible with non-G PAMs” Nat. Biotechnol., 2020 April; 38(4):471-481; the entire contents of each are hereby incorporated by reference.

Fusion Proteins Comprising a NapDNAbp and a Cytidine Deaminase and/or Adenosine Deaminase

[0644] Some aspects of the disclosure provide fusion proteins comprising a Cas9 domain or other nucleic acid programmable DNA binding protein (e.g., Cas12) and one or more cytidine deaminase or adenosine deaminase domains. It should be appreciated that the Cas9 domain may be any of the Cas9 domains or Cas9 proteins (e.g., dCas9 or nCas9) provided herein. In some embodiments, any of the Cas9 domains or Cas9 proteins (e.g., dCas9 or nCas9) provided herein may be fused with any of the cytidine deaminases and/or adenosine deaminases provided herein. The domains of the base editors disclosed herein can be arranged in any order.

[0645] In some embodiments, the fusion protein comprises the following domains A-C, A-D, or A-E:
[0646] NH₂-[A-B-C]-COOH;
[0647] NH₂-[A-B-C-D]-COOH; or
[0648] NH₂-[A-B-C-D-E]-COOH;
   wherein A and C or A, C, and E, each comprises one or more of the following:
[0649] an adenosine deaminase domain or an active fragment thereof,
[0650] a cytidine deaminase domain or an active fragment thereof, and

[0651] wherein B or B and D, each comprises one or more domains having nucleic acid sequence specific binding activity.

[0652] In some embodiments, the fusion protein comprises the following structure:
[0653] NH₂-[Aₙ-Bₒ-Cₙ]-COOH;
[0654] NH₂-[Aₙ-Bₒ-Cₙ-Dₒ]-COOH; or
[0655] NH₂-[Aₙ-Bₒ-Cₚ-Dₒ-E_{q}]-COOH;
   wherein A and C or A, C, and E, each comprises one or more of the following:
[0656] an adenosine deaminase domain or an active fragment thereof,
[0657] a cytidine deaminase domain or an active fragment thereof, and
   wherein n is an integer: 1, 2, 3, 4, or 5, wherein p is an integer: 0, 1, 2, 3, 4, or 5; wherein q is an integer 0, 1, 2, 3, 4, or 5; and wherein B or B and D each comprises a domain having nucleic acid sequence specific binding activity; and wherein o is an integer: 1, 2, 3, 4, or 5.

[0658] For example, and without limitation, in some embodiments, the fusion protein comprises the structure:
[0659] NH2-[adenosine deaminase]-[Cas9 domain]-COOH;
[0660] NH2-[Cas9 domain]-[adenosine deaminase]-COOH;
[0661] NH2-[cytidine deaminase]-[Cas9 domain]-COOH;
[0662] NH2-[Cas9 domain]-[cytidine deaminase]-COOH;
[0663] NH2-[cytidine deaminase]-[Cas9 domain]-[adenosine deaminase]-COOH;
[0664] NH2-[adenosine deaminase]-[Cas9 domain]-[cytidine deaminase]-COOH;
[0665] NH2-[adenosine deaminase]-[cytidine deaminase]-[Cas9 domain]-COOH;
[0666] NH2-[cytidine deaminase]-[adenosine deaminase]-[Cas9 domain]-COOH;
[0667] NH2-[Cas9 domain]-[adenosine deaminase]-[cytidine deaminase]-COOH; or
[0668] NH2-[Cas9 domain]-[cytidine deaminase]-[adenosine deaminase]-COOH.

[0669] In some embodiments, any of the Cas12 domains or Cas12 proteins provided herein may be fused with any of the cytidine or adenosine deaminases provided herein. For example, and without limitation, in some embodiments, the fusion protein comprises the structure:
[0670] NH2-[adenosine deaminase]-[Cas12 domain]-COOH;
[0671] NH2-[Cas12 domain]-[adenosine deaminase]-COOH;
[0672] NH2-[cytidine deaminase]-[Cas12 domain]-COOH;
[0673] NH2-[Cas12 domain]-[cytidine deaminase]-COOH;
[0674] NH2-[cytidine deaminase]-[Cas12 domain]-[adenosine deaminase]-COOH;
[0675] NH2-[adenosine deaminase]-[Cas12 domain]-[cytidine deaminase]-COOH;
[0676] NH2-[adenosine deaminase]-[cytidine deaminase]-[Cas12 domain]-COOH;
[0677] NH2-[cytidine deaminase]-[adenosine deaminase]-[Cas12 domain]-COOH;
[0678] NH2-[Cas12 domain]-[adenosine deaminase]-[cytidine deaminase]-COOH; or
[0679] NH2-[Cas12 domain]-[cytidine deaminase]-[adenosine deaminase]-COOH.

[0680] In some embodiments, the adenosine deaminase is a TadA*8. Exemplary fusion protein structures include the following:
[0681] NH2-[TadA*8]-[Cas9 domain]-COOH;
[0682] NH2-[Cas9 domain][TadA*8]-COOH;
[0683] NH2-[TadA*8]-[Cas12 domain]-COOH; or
[0684] NH2-[Cas12 domain][TadA*8]-COOH.

[0685] In some embodiments, the adenosine deaminase of the fusion protein comprises a TadA*8 and a cytidine deaminase and/or an adenosine deaminase. In some embodiments, the TadA*8 is TadA*8.1, TadA*8.2, TadA*8.3, TadA*8.4, TadA*8.5, TadA*8.6, TadA*8.7, TadA*8.8, TadA*8.9, TadA*8.10, TadA*8.11, TadA*8.12, TadA*8.13, TadA*8.14, TadA*8.15, TadA*8.16, TadA*8.17, TadA*8.18, TadA*8.19, TadA*8.20, TadA*8.21, TadA*8.22, TadA*8.23, or TadA*8.24.

[0686] Exemplary fusion protein structures include the following:
[0687] NH2-[TadA*8]-[Cas9/Cas12]-[adenosine deaminase]-COOH;
[0688] NH2-[adenosine deaminase]-[Cas9/Cas12]-[TadA*8]-COOH;
[0689] NH2-[TadA*8]-[Cas9/Cas12]-[cytidine deaminase]-COOH; or
[0690] NH2-[cytidine deaminase]-[Cas9/Cas12]-[TadA*8]-COOH.

[0691] In some embodiments, the adenosine deaminase of the fusion protein comprises a TadA*9 and a cytidine deaminase and/or an adenosine deaminase. Exemplary fusion protein structures include the following:
[0692] NH2-[TadA*9]-[Cas9/Cas12]-[adenosine deaminase]-COOH;
[0693] NH2-[adenosine deaminase]-[Cas9/Cas12]-[TadA*9]-COOH;
[0694] NH2-[TadA*9]-[Cas9/Cas12]-[cytidine deaminase]-COOH; or
[0695] NH2-[cytidine deaminase]-[Cas9/Cas12]-[TadA*9]-COOH.

[0696] In some embodiments, the fusion protein can comprise a deaminase flanked by an N-terminal fragment and a C-terminal fragment of a Cas9 or Cas12 polypeptide. In some embodiments, the fusion protein comprises a cytidine deaminase flanked by an N-terminal fragment and a C-terminal fragment of a Cas9 or Cas12 polypeptide. In some embodiments, the fusion protein comprises an adenosine deaminase flanked by an N-terminal fragment and a C-terminal fragment of a Cas9 or Cas 12 polypeptide.

[0697] In some embodiments, the fusion proteins comprising a cytidine deaminase or adenosine deaminase and a napDNAbp (e.g., Cas9 or Cas12 domain) do not include a linker sequence. In some embodiments, a linker is present between the cytidine or adenosine deaminase and the napDNAbp. In some embodiments, the “−” used in the general architecture above indicates the presence of an optional linker. In some embodiments, cytidine or adenosine deaminase and the napDNAbp are fused via any of the linkers provided herein. For example, in some embodiments the cytidine or adenosine deaminase and the napDNAbp are fused via any of the linkers provided herein.

[0698] It should be appreciated that the fusion proteins of the present disclosure may comprise one or more additional features. For example, in some embodiments, the fusion protein may comprise inhibitors, cytoplasmic localization sequences, export sequences, such as nuclear export sequences, or other localization sequences, as well as sequence tags that are useful for solubilization, purification, or detection of the fusion proteins. Suitable protein tags provided herein include, but are not limited to, biotin carboxylase carrier protein (BCCP) tags, myc-tags, calmodulin-tags, FLAG-tags, hemagglutinin (HA)-tags, polyhistidine tags, also referred to as histidine tags or His-tags, maltose binding protein (MBP)-tags, nus-tags, glutathione-S-transferase (GST)-tags, green fluorescent protein (GFP)-tags, thioredoxin-tags, S-tags, Softags (e.g., Softag 1, Softag 3), strep-tags, biotin ligase tags, FlAsH tags, V5 tags, and SBP-tags. Additional suitable sequences will be apparent to those of skill in the art. In some embodiments, the fusion protein comprises one or more His tags.

[0699] Exemplary, yet nonlimiting, fusion proteins are described in International PCT Application Nos. PCT/2017/044935, PCT/US2019/044935, and PCT/US2020/016288, each of which is incorporated herein by reference for its entirety.

### Fusion Proteins Comprising a Nuclear Localization Sequence (NLS)

[0700] In some embodiments, the fusion proteins provided herein further comprise one or more (e.g., 2, 3, 4, 5) nuclear targeting sequences, for example a nuclear localization sequence (NLS). In one embodiment, a bipartite NLS is used. In some embodiments, a NLS comprises an amino acid sequence that facilitates the importation of a protein, that comprises an NLS, into the cell nucleus (e.g., by nuclear transport). In some embodiments, the NLS is fused to the N-terminus or the C-terminus of the fusion protein. In some embodiments, the NLS is fused to the C-terminus or N-terminus of an nCas9 domain or a dCas9 domain. In some embodiments, the NLS is fused to the N-terminus or C-terminus of the Cas12 domain. In some embodiments, the NLS is fused to the N-terminus or C-terminus of the cytidine or adenosine deaminase. In some embodiments, the NLS is fused to the fusion protein via one or more linkers. In some embodiments, the NLS is fused to the fusion protein without a linker. In some embodiments, the NLS comprises an amino acid sequence of any one of the NLS sequences provided or referenced herein. Additional nuclear localization sequences are known in the art and would be apparent to the skilled artisan. For example, NLS sequences are described in Plank et al., PCT/EP2000/011690, the contents of which are incorporated herein by reference for their disclosure of exemplary nuclear localization sequences. In some embodiments, an NLS comprises the amino acid sequence PKKKRKVEGADKRTADGSEFESPKKKRKV (SEQ ID NO: 83), KRTADGSEFESPKKKRKV (SEQ ID NO: 84), KRPAATKKAGQAKKKK (SEQ ID NO: 85), KKTELQTTNAENKTKKL (SEQ ID NO: 86), KRGINDRNFWRGENGRKTR (SEQ ID NO: 87), RKSGKIAAIWKRPRKPKKKRKV (SEQ ID NO: 1424), or MDSLLMNRRKFLYQFKNVRWAKGRRETYLC (SEQ ID NO: 90).

[0701] In some embodiments, the fusion proteins comprising a cytidine or adenosine deaminase, a Cas9 domain, and an NLS do not comprise a linker sequence. In some embodiments, linker sequences between one or more of the domains or proteins (e.g., cytidine or adenosine deaminase, Cas9 domain or NLS) are present. In some embodiments, a linker is present between the cytidine deaminase and adenosine deaminase domains and the napDNAbp. In some embodiments, the “-” used in the general architecture below indicates the presence of an optional linker. In some embodiments, the cytidine deaminase and adenosine deaminase and the napDNAbp are fused via any of the linkers provided herein. For example, in some embodiments the cytidine deaminase and adenosine deaminase and the napDNAbp are fused via any of the linkers provided herein.

[0702] In some embodiments, the general architecture of exemplary napDNAbp (e.g., Cas9 or Cas12) fusion proteins with a cytidine or adenosine deaminase and a napDNAbp (e.g., Cas9 or Cas12) domain comprises any one of the following structures, where NLS is a nuclear localization sequence (e.g., any NLS provided herein), NH₂ is the N-terminus of the fusion protein, and COOH is the C-terminus of the fusion protein:
[0703] NH₂-NLS-[cytidine deaminase]-[napDNAbp domain]-COOH;
[0704] NH₂-NLS [napDNAbp domain]-[cytidine deaminase]-COOH;
[0705] NH₂-[cytidine deaminase]-[napDNAbp domain]-NLS—COOH;
[0706] NH₂-[napDNAbp domain]-[cytidine deaminase]-NLS—COOH;
[0707] NH₂-NLS-[adenosine deaminase]-[napDNAbp domain]-COOH;
[0708] NH₂-NLS [napDNAbp domain]-[adenosine deaminase]-COOH;
[0709] NH₂-[adenosine deaminase]-[napDNAbp domain]-NLS—COOH;
[0710] NH₂-[napDNAbp domain]-[adenosine deaminase]-NLS—COOH;
[0711] NH₂-NLS-[cytidine deaminase]-[napDNAbp domain]-[adenosine deaminase]-COOH;
[0712] NH₂-NLS-[adenosine deaminase]-[napDNAbp domain]-[cytidine deaminase]-COOH;
[0713] NH₂-NLS-[adenosine deaminase]-[cytidine deaminase]-[napDNAbp domain]-COOH;
[0714] NH₂-NLS-[cytidine deaminase]-[adenosine deaminase]-[napDNAbp domain]-COOH;
[0715] NH₂-NLS-[napDNAbp domain]-[adenosine deaminase]-[cytidine deaminase]-COOH;
[0716] NH₂-NLS-[napDNAbp domain]-[cytidine deaminase]-[adenosine deaminase]-COOH;
[0717] NH₂-[cytidine deaminase]-[napDNAbp domain]-[adenosine deaminase]-NLS—COOH;
[0718] NH₂-[adenosine deaminase]-[napDNAbp domain]-[cytidine deaminase]-NLS—COOH;
[0719] NH₂-[adenosine deaminase]-[cytidine deaminase]-[napDNAbp domain]-NLS—COOH;
[0720] NH₂-[cytidine deaminase]-[adenosine deaminase]-[napDNAbp domain]-NLS—COOH;
[0721] NH₂-[napDNAbp domain]-[adenosine deaminase]-[cytidine deaminase]-NLS—COOH; or

[0722] NH₂-[napDNAbp domain]-[cytidine deaminase]-[adenosine deaminase]-NLS—COOH. In some embodiments, the NLS is present in a linker or the NLS is flanked by linkers, for example described herein. A bipartite NLS comprises two basic amino acid clusters, which are separated by a relatively short spacer sequence (hence bipartite—2 parts, while monopartite NLSs are not). The NLS of nucleoplasmin, KR[PAATKKAGQA]KKKK (SEQ ID NO: 85), is the prototype of the ubiquitous bipartite signal: two clusters of basic amino acids, separated by a spacer of about amino acids. The sequence of an exemplary bipartite NLS follows: PKKKRKVEGADKRTADGSEFESPKKKRKV (SEQ ID NO: 83)

[0723] A vector that encodes a CRISPR enzyme comprising one or more nuclear localization sequences (NLSs) can be used. For example, there can be or be about 1, 2, 3, 4, 5, 6, 7, 8, 9, NLSs used. A CRISPR enzyme can comprise the NLSs at or near the amino-terminus, about or more than about 1, 2, 3, 4, 5, 6, 7, 8, 9, 10 NLSs at or near the carboxy-terminus, or any combination thereof (e.g., one or more NLS at the amino-terminus and one or more NLS at the carboxy terminus). When more than one NLS is present, each can be selected independently of others, such that a single NLS can be present in more than one copy and/or in combination with one or more other NLSs present in one or more copies.

[0724] CRISPR enzymes used in the methods can comprise about 6 NLSs. An NLS is considered near the N- or C-terminus when the nearest amino acid to the NLS is within about 50 amino acids along a polypeptide chain from the N- or C-terminus, e.g., within 1, 2, 3, 4, 5, 10, 15, 20, 25, 30, 40, or 50 amino acids.

### Additional Domains

[0725] A base editor described herein can include any domain which helps to facilitate the nucleobase editing, modification or altering of a nucleobase of a polynucleotide. In some embodiments, a base editor comprises a polynucleotide programmable nucleotide binding domain (e.g., Cas9), a nucleobase editing domain (e.g., deaminase domain), and one or more additional domains. In some embodiments, the additional domain can facilitate enzymatic or catalytic functions of the base editor, binding functions of the base editor, or be inhibitors of cellular machinery (e.g., enzymes) that could interfere with the desired base editing result. In some embodiments, a base editor can comprise a nuclease, a nickase, a recombinase, a deaminase, a methyltransferase, a methylase, an acetylase, an acetyltransferase, a transcriptional activator, or a transcriptional repressor domain.

[0726] In some embodiments, a base editor can comprise an uracil glycosylase inhibitor (UGI) domain. In some embodiments, cellular DNA repair response to the presence of U: G heteroduplex DNA can be responsible for a decrease in nucleobase editing efficiency in cells. In such embodiments, uracil DNA glycosylase (UDG) can catalyze removal of U from DNA in cells, which can initiate base excision repair (BER), mostly resulting in reversion of the U:G pair to a C:G pair. In such embodiments, BER can be inhibited in base editors comprising one or more domains that bind the single strand, block the edited base, inhibit UGI, inhibit BER, protect the edited base, and/or promote repairing of the non-edited strand. Thus, this disclosure contemplates a base editor fusion protein comprising a UGI domain.

[0727] In some embodiments, a base editor comprises as a domain all or a portion of a double-strand break (DSB) binding protein. For example, a DSB binding protein can include a Gam protein of bacteriophage Mu that can bind to the ends of DSBs and can protect them from degradation. See Komor, A. C., et al., “Improved base excision repair inhibition and bacteriophage Mu Gam protein yields C:G-to-T:A base editors with higher efficiency and product purity” Science Advances 3:eaao4774 (2017), the entire content of which is hereby incorporated by reference.

[0728] Additionally, in some embodiments, a Gam protein can be fused to an N terminus of a base editor. In some embodiments, a Gam protein can be fused to a C terminus of a base editor. The Gam protein of bacteriophage Mu can bind to the ends of double strand breaks (DSBs) and protect them from degradation. In some embodiments, using Gam to bind the free ends of DSB can reduce indel formation during the process of base editing. In some embodiments, 174-residue Gam protein is fused to the N terminus of the base editors. See Komor, A. C., et al., “Improved base excision repair inhibition and bacteriophage Mu Gam protein yields C:G-to-T:A base editors with higher efficiency and product purity” Science Advances 3:eaao4774 (2017). In some embodiments, a mutation or mutations can change the length of a base editor domain relative to a wild type domain. For example, a deletion of at least one amino acid in at least one domain can reduce the length of the base editor. In another case, a mutation or mutations do not change the length of a domain relative to a wild type domain. For example, substitutions in any domain does not change the length of the base editor.

[0729] Non-limiting examples of such base editors, where the length of all the domains is the same as the wild type domains, can include:
[0730] NH2-[nucleobase editing domain]-Linker1-[APOBEC1]-Linker2-[nucleobase editing domain]-COOH;
[0731] NH2-[nucleobase editing domain]-Linker1-[APOBEC1]-[nucleobase editing domain]-COOH;
[0732] NH2-[nucleobase editing domain]-[APOBEC1]-Linker2-[nucleobase editing domain]-COOH;
[0733] NH2-[nucleobase editing domain]-[APOBEC1]-[nucleobase editing domain]-COOH;
[0734] NH₂-[nucleobase editing domain]-Linker1-[APOBEC1]-Linker2-[nucleobase editing domain]-[UGI]-COOH;
[0735] NH2-[nucleobase editing domain]-Linker1-[APOBEC1]-[nucleobase editing domain]-[UGI]-COOH;
[0736] NH2-[nucleobase editing domain]-[APOBEC1]-Linker2-[nucleobase editing domain]-[UGI]-COOH;
[0737] NH2-[nucleobase editing domain]-[APOBEC1]-[nucleobase editing domain]-[UGI]-COOH;
[0738] NH2-[UGI]-[nucleobase editing domain]-Linker1-[APOBEC1]-Linker2-[nucleobase editing domain]-COOH;
[0739] NH2-[UGI]-[nucleobase editing domain]-Linker1-[APOBEC1]-[nucleobase editing domain]-COOH;
[0740] NH2-[UGI]-[nucleobase editing domain]-[APOBEC1]-Linker2-[nucleobase editing domain]-COOH; or
[0741] NH2-[UGI]-[nucleobase editing domain]-[APOBEC1]-[nucleobase editing domain]-COOH.

### F. Base Editor System

[0742] Provided herein are systems, compositions, and methods for editing a nucleobase using a base editor system. In some embodiments, the base editor system comprises (1) a base editor (BE) comprising a polynucleotide programmable nucleotide binding domain and a nucleobase editing domain (e.g., a deaminase domain) for editing the nucleobase; and (2) a guide polynucleotide (e.g., guide RNA) in conjunction with the polynucleotide programmable nucleotide binding domain. In some embodiments, the base editor system is a cytidine base editor (CBE) or an adenosine base editor (ABE). In some embodiments, the polynucleotide programmable nucleotide binding domain is a polynucleotide programmable DNA or RNA binding domain. In some embodiments, the nucleobase editing domain is a deaminase domain. In some embodiments, a deaminase domain can be a cytidine deaminase or an cytosine deaminase. In some embodiments, a deaminase domain can be an adenine deaminase or an adenosine deaminase. In some embodiments, the adenosine base editor can deaminate adenine in DNA. In some embodiments, the base editor is capable of deaminating a cytidine in DNA.

[0743] In some embodiments, a base editing system as provided herein provides a new approach to genome editing that uses a fusion protein containing a catalytically defective Streptococcus pyogenes Cas9, a deaminase (e.g., cytidine or adenosine deaminase), and an inhibitor of base excision repair to induce programmable, single nucleotide (C→T or A→G) changes in DNA without generating double-strand DNA breaks, without requiring a donor DNA template, and without inducing an excess of stochastic insertions and deletions.

[0744] Details of nucleobase editing proteins are described in International PCT Application Nos. PCT/2017/045381 (WO2018/027078) and PCT/US2016/058344 (WO2017/070632), each of which is incorporated herein by reference for its entirety. Also see Komor, A. C., et al., “Programmable editing of a target base in genomic DNA without double-stranded DNA cleavage” Nature 533, 420-424 (2016); Gaudelli, N. M., et al., “Programmable base editing of A·T to G·C in genomic DNA without DNA cleavage” Nature 551, 464-471 (2017); and Komor, A. C., et al., “Improved base excision repair inhibition and bacteriophage Mu Gam protein yields C:G-to-T:A base editors with higher efficiency and product purity” Science Advances 3:eaao4774 (2017), the entire contents of which are hereby incorporated by reference.

[0745] Use of the base editor system provided herein comprises the steps of: (a) contacting a target nucleotide sequence of a polynucleotide (e.g., double- or single stranded DNA or RNA) of a subject with a base editor system comprising a nucleobase editor (e.g., an adenosine base editor or a cytidine base editor) and a guide polynucleic acid (e.g., gRNA), wherein the target nucleotide sequence comprises a targeted nucleobase pair; (b) inducing strand separation of said target region; (c) converting a first nucleobase of said target nucleobase pair in a single strand of the target region to a second nucleobase; and (d) cutting no more than one strand of said target region, where a third nucleobase complementary to the first nucleobase base is replaced by a fourth nucleobase complementary to the second nucleobase. It should be appreciated that in some embodiments, step (b) is omitted. In some embodiments, said targeted nucleobase pair is a plurality of nucleobase pairs in one or more genes. In some embodiments, the base editor system provided herein is capable of multiplex editing of a plurality of nucleobase pairs in one or more genes. In some embodiments, the plurality of nucleobase pairs is located in the same gene. In some embodiments, the plurality of nucleobase pairs is located in one or more genes, wherein at least one gene is located in a different locus.

[0746] In some embodiments, the cut single strand (nicked strand) is hybridized to the guide nucleic acid. In some embodiments, the cut single strand is opposite to the strand comprising the first nucleobase. In some embodiments, the base editor comprises a Cas9 domain. In some embodiments, the first base is adenine, and the second base is not a G, C, A, or T. In some embodiments, the second base is inosine.

[0747] In some embodiments, a single guide polynucleotide may be utilized to target a deaminase to a target nucleic acid sequence. In some embodiments, a single pair of guide polynucleotides may be utilized to target different deaminases to a target nucleic acid sequence.

[0748] The nucleobase components and the polynucleotide programmable nucleotide binding component of a base editor system may be associated with each other covalently or non-covalently. For example, in some embodiments, the deaminase domain can be targeted to a target nucleotide sequence by a polynucleotide programmable nucleotide binding domain. In some embodiments, a polynucleotide programmable nucleotide binding domain can be fused or linked to a deaminase domain. In some embodiments, a polynucleotide programmable nucleotide binding domain can target a deaminase domain to a target nucleotide sequence by non-covalently interacting with or associating with the deaminase domain. For example, in some embodiments, the nucleobase editing component, e.g., the deaminase component can comprise an additional heterologous portion or domain that is capable of interacting with, associating with, or capable of forming a complex with an additional heterologous portion or domain that is part of a polynucleotide programmable nucleotide binding domain. In some embodiments, the additional heterologous portion may be capable of binding to, interacting with, associating with, or forming a complex with a polypeptide. In some embodiments, the additional heterologous portion may be capable of binding to, interacting with, associating with, or forming a complex with a polynucleotide. In some embodiments, the additional heterologous portion may be capable of binding to a guide polynucleotide. In some embodiments, the additional heterologous portion may be capable of binding to a polypeptide linker. In some embodiments, the additional heterologous portion may be capable of binding to a polynucleotide linker. The additional heterologous portion may be a protein domain. In some embodiments, the additional heterologous portion may be a K Homology (KH) domain, a MS2 coat protein domain, a PP7 coat protein domain, a SfMu Com coat protein domain, a steril alpha motif, a telomerase Ku binding motif and Ku protein, a telomerase Sm7 binding motif and Sm7 protein, or an RNA recognition motif.

[0749] A base editor system may further comprise a guide polynucleotide component. It should be appreciated that components of the base editor system may be associated with each other via covalent bonds, noncovalent interactions, or any combination of associations and interactions thereof. In some embodiments, a deaminase domain can be targeted to a target nucleotide sequence by a guide polynucleotide. For example, in some embodiments, the nucleobase editing component of the base editor system, e.g., the deaminase component, can comprise an additional heterologous portion or domain (e.g., polynucleotide binding domain such as an RNA or DNA binding protein) that is capable of interacting with, associating with, or capable of forming a complex with a portion or segment (e.g., a polynucleotide motif) of a guide polynucleotide. In some embodiments, the additional heterologous portion or domain (e.g., polynucleotide binding domain such as an RNA or DNA binding protein) can be fused or linked to the deaminase domain. In some embodiments, the additional heterologous portion may be capable of binding to, interacting with, associating with, or forming a complex with a polypeptide. In some embodiments, the additional heterologous portion may be capable of binding to, interacting with, associating with, or forming a complex with a polynucleotide. In some embodiments, the additional heterologous portion may be capable of binding to a guide polynucleotide. In some embodiments, the additional heterologous portion may be capable of binding to a polypeptide linker. In some embodiments, the additional heterologous portion may be capable of binding to a polynucleotide linker. The additional heterologous portion may be a protein domain. In some embodiments, the additional heterologous portion may be a K Homology (KH) domain, a MS2 coat protein domain, a PP7 coat protein domain, a SfMu Com coat protein domain, a sterile alpha motif, a telomerase Ku binding motif and Ku protein, a telomerase Sm7 binding motif and Sm7 protein, or an RNA recognition motif.

[0750] In some embodiments, a base editor system can further comprise an inhibitor of base excision repair (BER) component. It should be appreciated that components of the base editor system may be associated with each other via covalent bonds, noncovalent interactions, or any combination of associations and interactions thereof. The inhibitor of BER component may comprise a base excision repair inhibitor. In some embodiments, the inhibitor of base excision repair can be a uracil DNA glycosylase inhibitor (UGI). In some embodiments, the inhibitor of base excision repair can be an inosine base excision repair inhibitor. In some embodiments, the inhibitor of base excision repair can be targeted to the target nucleotide sequence by the polynucleotide programmable nucleotide binding domain. In some embodiments, a polynucleotide programmable nucleotide binding domain can be fused or linked to an inhibitor of base excision repair. In some embodiments, a polynucleotide programmable nucleotide binding domain can be fused or linked to a deaminase domain and an inhibitor of base excision repair. In some embodiments, a polynucleotide programmable nucleotide binding domain can target an inhibitor of base excision repair to a target nucleotide sequence by non-covalently interacting with or associating with the inhibitor of base excision repair. For example, in some embodiments, the inhibitor of base excision repair component can comprise an additional heterologous portion or domain that is capable of interacting with, associating with, or capable of forming a complex with an additional heterologous portion or domain that is part of a polynucleotide programmable nucleotide binding domain. In some embodiments, the inhibitor of base excision repair can be targeted to the target nucleotide sequence by the guide polynucleotide. For example, in some embodiments, the inhibitor of base excision repair can comprise an additional heterologous portion or domain (e.g., polynucleotide binding domain such as an RNA or DNA binding protein) that is capable of interacting with, associating with, or capable of forming a complex with a portion or segment (e.g., a polynucleotide motif) of a guide polynucleotide. In some embodiments, the additional heterologous portion or domain of the guide polynucleotide (e.g., polynucleotide binding domain such as an RNA or DNA binding protein) can be fused or linked to the inhibitor of base excision repair. In some embodiments, the additional heterologous portion may be capable of binding to, interacting with, associating with, or forming a complex with a polynucleotide. In some embodiments, the additional heterologous portion may be capable of binding to a guide polynucleotide. In some embodiments, the additional heterologous portion may be capable of binding to a polypeptide linker. In some embodiments, the additional heterologous portion may be capable of binding to a polynucleotide linker. The additional heterologous portion may be a protein domain. In some embodiments, the additional heterologous portion may be a K Homology (KH) domain, a MS2 coat protein domain, a PP7 coat protein domain, a SfMu Com coat protein domain, a sterile alpha motif, a telomerase Ku binding motif and Ku protein, a telomerase Sm7 binding motif and Sm7 protein, or an RNA recognition motif.

[0751] In some embodiments, the base editor inhibits base excision repair (BER) of the edited strand. In some embodiments, the base editor protects or binds the non-edited strand. In some embodiments, the base editor comprises UGI activity. In some embodiments, the base editor comprises a catalytically inactive inosine-specific nuclease. In some embodiments, the base editor comprises nickase activity. In some embodiments, the intended edit of base pair is upstream of a PAM site. In some embodiments, the intended edit of base pair is 1, 2, 3, 4, 5, 6, 7, 8, 9, 10, 11, 12, 13, 14, 15, 16, 17, 18, 19, or 20 nucleotides upstream of the PAM site. In some embodiments, the intended edit of base-pair is downstream of a PAM site. In some embodiments, the intended edited base pair is 1, 2, 3, 4, 5, 6, 7, 8, 9, 10, 11, 12, 13, 14, 15, 16, 17, 18, 19, or 20 nucleotides downstream stream of the PAM site.

[0752] In some embodiments, the method does not require a canonical (e.g., NGG) PAM site. In some embodiments, the nucleobase editor comprises a linker or a spacer. In some embodiments, the linker or spacer is 1-25 amino acids in length. In some embodiments, the linker or spacer is 5-20 amino acids in length. In some embodiments, the linker or spacer is 10, 11, 12, 13, 14, 15, 16, 17, 18, 19, or 20 amino acids in length.

[0753] In some embodiments, the base editing fusion proteins provided herein need to be positioned at a precise location, for example, where a target base is placed within a defined region (e.g., a “deamination window”). In some embodiments, a target can be within a 4 base region. In some embodiments, such a defined target region can be approximately 15 bases upstream of the PAM. See Komor, A. C., et al., “Programmable editing of a target base in genomic DNA without double-stranded DNA cleavage” Nature 533, 420-424 (2016); Gaudelli, N. M., et al., “Programmable base editing of A·T to G·C in genomic DNA without DNA cleavage” Nature 551, 464-471 (2017); and Komor, A. C., et al., “Improved base excision repair inhibition and bacteriophage Mu Gam protein yields C:G-to-T:A base editors with higher efficiency and product purity” Science Advances 3:eaao4774 (2017), the entire contents of which are hereby incorporated by reference.

[0754] In some embodiments, the target region comprises a target window, wherein the target window comprises the target nucleobase pair. In some embodiments, the target window comprises 1-10 nucleotides. In some embodiments, the target window is 1, 2, 3, 4, 5, 6, 7, 8, 9, 10, 11, 12, 13, 14, 15, 16, 17, 18, 19, or 20 nucleotides in length. In some embodiments, the intended edit of base pair is within the target window. In some embodiments, the target window comprises the intended edit of base pair. In some embodiments, the method is performed using any of the base editors provided herein. In some embodiments, a target window is a deamination window. A deamination window can be the defined region in which a base editor acts upon and deaminates a target nucleotide. In some embodiments, the deamination window is within a 2, 3, 4, 5, 6, 7, 8, 9, or 10 base regions. In some embodiments, the deamination window is 5, 6, 7, 8, 9, 10, 11, 12, 13, 14, 15, 16, 17, 18, 19, 20, 21, 22, 23, 24, or 25 bases upstream of the PAM.

[0755] The base editors of the present disclosure can comprise any domain, feature or amino acid sequence which facilitates the editing of a target polynucleotide sequence. For example, in some embodiments, the base editor comprises a nuclear localization sequence (NLS). In some embodiments, an NLS of the base editor is localized between a deaminase domain and a polynucleotide programmable nucleotide binding domain. In some embodiments, an NLS of the base editor is localized C-terminal to a polynucleotide programmable nucleotide binding domain.

[0756] Other exemplary features that can be present in a base editor as disclosed herein are localization sequences, such as cytoplasmic localization sequences, export sequences, such as nuclear export sequences, or other localization sequences, as well as sequence tags that are useful for solubilization, purification, or detection of the fusion proteins. Suitable protein tags provided herein include, but are not limited to, biotin carboxylase carrier protein (BCCP) tags, myc-tags, calmodulin-tags, FLAG-tags, hemagglutinin (HA)-tags, polyhistidine tags, also referred to as histidine tags or His-tags, maltose binding protein (MBP)-tags, nus-tags, glutathione-S-transferase (GST)-tags, green fluorescent protein (GFP)-tags, thioredoxin-tags, S-tags, Softags (e.g., Softag 1, Softag 3), strep-tags, biotin ligase tags, FlAsH tags, V5 tags, and SBP-tags. Additional suitable sequences will be apparent to those of skill in the art. In some embodiments, the fusion protein comprises one or more His tags.

[0757] In some embodiments, non-limiting exemplary cytidine base editors (CBE) include BE1 (APOBEC1-XTEN-dCas9), BE2 (APOBEC1-XTEN-dCas9-UGI), BE3 (APOBEC1-XTEN-dCas9(A840H)-UGI), BE3-Gam, saBE3, saBE4-Gam, BE4, BE4-Gam, saBE4, or saB4E-Gam. BE4 extends the APOBEC1-Cas9n(D10A) linker to 32 amino acids and the Cas9n-UGI linker to 9 amino acids, and appends a second copy of UGI to the C-terminus of the construct with another 9-amino acid linker into a single base editor construct. The base editors saBE3 and saBE4 have the S. pyogenes Cas9n(D10A) replaced with the smaller S. aureus Cas9n(D10A). BE3-Gam, saBE3-Gam, BE4-Gam, and saBE4-Gam have 174 residues of Gam protein fused to the N-terminus of BE3, saBE3, BE4, and saBE4 via the 16 amino acid XTEN linker.

[0758] In some embodiments, the adenosine base editor (ABE) can deaminate adenine in DNA. In some embodiments, ABE is generated by replacing APOBEC1 component of BE3 with natural or engineered E. coli TadA, human ADAR2, mouse ADA, or human ADAT2. In some embodiments, ABE comprises evolved TadA variant. In some embodiments, the ABE is ABE 1.2 (TadA*-XTEN-nCas9-NLS). In some embodiments, TadA* comprises A106V and D108N mutations.

[0759] In some embodiments, the ABE is a second-generation ABE. In some embodiments, the ABE is ABE2.1, which comprises additional mutations D147Y and E155V in TadA* (TadA*2.1). In some embodiments, the ABE is ABE2.2, ABE2.1 fused to catalytically inactivated version of human alkyl adenine DNA glycosylase (AAG with E125Q mutation). In some embodiments, the ABE is ABE2.3, ABE2.1 fused to catalytically inactivated version of E. coli Endo V (inactivated with D35A mutation). In some embodiments, the ABE is ABE2.6 which has a linker twice as long (32 amino acids, (SGGS)₂ (SEQ ID NO: 1425)-XTEN-(SGGS)₂ (SEQ ID NO: 1425)) as the linker in ABE2.1. In some embodiments, the ABE is ABE2.7, which is ABE2.1 tethered with an additional wild-type TadA monomer. In some embodiments, the ABE is ABE2.8, which is ABE2.1 tethered with an additional TadA*2.1 monomer. In some embodiments, the ABE is ABE2.9, which is a direct fusion of evolved TadA (TadA*2.1) to the N-terminus of ABE2.1. In some embodiments, the ABE is ABE2.10, which is a direct fusion of wild-type TadA to the N-terminus of ABE2.1. In some embodiments, the ABE is ABE2.11, which is ABE2.9 with an inactivating E59A mutation at the N-terminus of TadA* monomer. In some embodiments, the ABE is ABE2.12, which is ABE2.9 with an inactivating E59A mutation in the internal TadA* monomer.

[0760] In some embodiments, the ABE is a third generation ABE. In some embodiments, the ABE is ABE3.1, which is ABE2.3 with three additional TadA mutations (L84F, H123Y, and I156F).

[0761] In some embodiments, the ABE is a fourth generation ABE. In some embodiments, the ABE is ABE4.3, which is ABE3.1 with an additional TadA mutation A142N (TadA*4.3).

[0762] In some embodiments, the ABE is a fifth generation ABE. In some embodiments, the ABE is ABE5.1, which is generated by importing a consensus set of mutations from surviving clones (H36L, R51L, S146C, and K157N) into ABE3.1. In some embodiments, the ABE is ABE5.3, which has a heterodimeric construct containing wild-type E. coli TadA fused to an internal evolved TadA*. In some embodiments, the ABE is ABE5.2, ABE5.4, ABE5.5, ABE5.6, ABE5.7, ABE5.8, ABE5.9, ABE5.10, ABE5.11, ABE5.12, ABE5.13, or ABE5.14, as shown in Table 10 below. In some embodiments, the ABE is a sixth generation ABE. In some embodiments, the ABE is ABE6.1, ABE6.2, ABE6.3, ABE6.4, ABE6.5, or ABE6.6, as shown in Table 10 below. In some embodiments, the ABE is a seventh generation ABE. In some embodiments, the ABE is ABE7.1, ABE7.2, ABE7.3, ABE7.4, ABE7.5, ABE7.6, ABE7.7, ABE7.8, ABE 7.9, or ABE7.10, as shown in Table 10 below.

TABLE 10
Genotypes of ABEs

| | 23 | 26 | 36 | 37 | 48 | 49 | 51 | 72 | 84 | 87 | 106 | 108 | 123 | 125 | 142 | 146 | 147 | 152 | 155 | 156 | 157 | 161 |
|---|---|---|---|---|---|---|---|---|---|---|---|---|---|---|---|---|---|---|---|---|---|---|
| ABE0.1 | W | R | H | N | P | | R | N | L | S | A | D | H | G | A | S | D | R | E | I | K | K |
| ABE0.2 | W | R | H | N | P | | R | N | L | S | A | D | H | G | A | S | D | R | E | I | K | K |
| ABE1.1 | W | R | H | IN | P | | R | N | L | S | A | N | H | G | A | S | D | R | E | I | K | K |
| ABE1.2 | W | R | H | N | P | | R | N | L | S | V | N | H | G | A | S | D | R | E | I | K | K |
| ABE2.1 | W | R | H | N | P | | R | N | L | S | V | N | H | G | A | S | Y | R | V | I | K | K |
| ABE2.2 | W | R | H | IN | P | | R | N | L | S | V | N | H | G | A | S | Y | R | V | I | K | K |
| ABE2.3 | W | R | H | IN | P | | R | N | L | S | V | N | H | G | A | S | Y | R | V | I | K | K |
| ABE2.4 | W | R | H | IN | P | | R | N | L | S | V | N | H | G | A | S | Y | R | V | I | K | K |
| ABE2.5 | W | R | H | IN | P | | R | N | L | S | V | N | H | G | A | S | Y | R | V | I | K | K |
| ABE2.6 | W | R | H | IN | P | | R | N | L | S | V | N | H | G | A | S | Y | R | V | I | K | K |
| ABE2.7 | W | R | H | IN | P | | R | N | L | S | V | N | H | G | A | S | Y | R | V | I | K | K |
| ABE2.8 | W | R | H | N | P | | R | N | L | S | V | N | H | G | A | S | Y | R | V | I | K | K |
| ABE2.9 | W | R | H | N | P | | R | N | L | S | V | N | H | G | A | S | Y | R | V | I | K | K |
| ABE2.10 | W | R | H | N | P | | R | N | L | S | V | N | H | G | A | S | Y | R | V | I | K | K |
| ABE2.11 | W | R | H | N | P | | R | N | L | S | V | N | H | G | A | S | Y | R | V | I | K | K |
| ABE2.12 | W | R | H | N | P | | R | N | L | S | V | N | H | G | A | S | Y | R | V | I | K | K |
| ABE3.1 | W | R | H | N | P | | R | N | F | S | V | N | Y | G | A | S | Y | R | V | F | K | K |
| ABE3.2 | W | R | H | N | P | | R | N | F | S | V | N | Y | G | A | S | Y | R | V | F | K | K |
| ABE3.3 | W | R | H | N | P | | R | N | F | S | V | N | Y | G | A | S | Y | R | V | F | K | K |
| ABE3.4 | W | R | H | N | P | | R | N | F | S | V | N | Y | G | A | S | Y | R | V | F | K | K |
| ABE3.5 | W | R | H | IN | P | | R | N | F | S | V | N | Y | G | A | S | Y | R | V | F | K | K |
| ABE3.6 | W | R | H | IN | P | | R | N | F | S | V | N | Y | G | A | S | Y | R | V | F | K | K |
| ABE3.7 | W | R | H | IN | P | | R | N | F | S | V | N | Y | G | A | S | Y | R | V | F | K | K |
| ABE3.8 | W | R | H | IN | P | | R | N | F | S | V | N | Y | G | A | S | Y | R | V | F | K | K |
| ABE4.1 | W | R | H | IN | P | | R | N | L | S | V | N | H | G | N | S | Y | R | V | I | K | K |
| ABE4.2 | W | G | H | N | P | | R | N | L | S | V | N | H | G | N | S | Y | R | V | I | K | K |
| ABE4.3 | W | R | H | N | P | | R | N | F | S | V | N | Y | G | N | S | Y | R | V | F | K | K |
| ABE5.1 | W | R | L | N | P | | L | N | F | S | V | N | Y | G | A | C | Y | R | V | F | N | K |
| ABE5.2 | W | R | H | S | P | | R | N | F | S | V | N | Y | G | A | S | Y | R | V | F | K | T |
| ABE5.3 | W | R | L | N | P | | L | N | I | S | V | N | Y | G | A | C | Y | R | V | F | N | K |
| ABE5.4 | W | R | H | S | P | | R | N | F | S | V | N | Y | G | A | S | Y | R | V | F | K | T |
| ABE5.5 | W | R | L | N | P | | L | N | F | S | V | N | Y | G | A | C | Y | R | V | F | N | K |
| ABE5.6 | W | R | L | N | P | | L | N | F | S | V | N | Y | G | A | C | Y | R | V | F | N | K |
| ABE5.7 | W | R | L | N | P | | L | N | F | S | V | N | Y | G | A | C | Y | R | V | F | N | K |
| ABE5.8 | W | R | L | IN | P | | L | N | F | S | V | N | Y | G | A | C | Y | R | V | F | N | K |
| ABE5.9 | W | R | L | N | P | | L | N | F | S | V | N | Y | G | A | C | Y | R | V | F | N | K |
| ABE5.10 | W | R | L | N | P | | L | N | F | S | V | N | Y | G | A | C | Y | R | V | F | N | K |
| ABE5.11 | W | R | L | N | P | | L | N | F | S | V | N | Y | G | A | C | Y | R | V | F | N | K |
| ABE5.12 | W | R | L | N | P | | L | N | F | S | V | N | Y | G | A | C | Y | R | V | F | N | K |
| ABE5.13 | W | R | H | N | P | | L | D | F | S | V | N | Y | A | A | S | Y | R | V | F | K | K |
| ABE5.14 | W | R | H | N | S | | L | N | F | C | V | N | Y | G | A | S | Y | R | V | F | K | K |
| ABE6.1 | W | R | H | N | S | | L | N | F | S | V | N | Y | G | N | S | Y | R | V | F | K | K |
| ABE6.2 | W | R | H | | T | V | L | N | F | S | V | N | Y | G | N | S | Y | R | V | F | N | K |
| ABE6.3 | W | R | L | N | S | | L | N | F | S | V | N | Y | G | A | C | Y | R | V | F | N | K |
| ABE6.4 | W | R | L | N | S | | L | N | F | S | V | N | Y | G | N | C | Y | R | V | F | N | K |
| ABE6.5 | W | R | L | N | T | V | L | N | F | S | V | N | Y | G | A | C | Y | R | V | F | N | K |
| ABE6.6 | W | R | L | IN | T | V | L | N | F | S | V | N | Y | G | N | C | Y | R | V | F | N | K |
| ABE7.1 | W | R | L | N | A | | L | N | F | S | V | N | Y | G | A | C | Y | R | V | F | N | K |
| ABE7.2 | W | R | L | N | A | | L | N | F | S | V | N | Y | G | N | C | Y | R | V | F | N | K |
| ABE7.3 | L | R | L | | A | | L | N | F | S | V | N | Y | G | A | C | Y | R | V | F | N | K |
| ABE7.4 | R | R | L | N | A | | L | N | F | S | V | N | Y | G | A | C | Y | R | V | F | N | K |
| ABE7.5 | W | R | L | N | A | | L | N | F | S | V | N | Y | G | A | C | Y | H | V | F | N | K |
| ABE7.6 | W | R | L | N | A | | L | N | I | S | V | N | Y | G | A | C | Y | P | V | F | N | K |
| ABE7.7 | L | R | L | N | A | | L | N | F | S | V | N | Y | G | A | C | Y | P | V | F | N | K |
| ABE7.8 | L | R | L | N | A | | L | N | F | S | V | N | Y | G | N | C | Y | R | V | F | N | K |
| ABE7.9 | L | R | L | N | A | | L | N | F | S | V | N | Y | G | N | C | Y | P | V | F | N | K |
| ABE7.10 | R | R | L | N | A | | L | N | F | S | V | N | Y | G | A | C | Y | P | V | F | N | K |

[0763] In some embodiments, the base editor is an eighth generation ABE (ABE8). In some embodiments, the ABE8 contains a TadA*8 variant. In some embodiments, the ABE8 has a monomeric construct containing a TadA*8 variant (“ABE8.x-m”). In some embodiments, the ABE8 is ABE8.1-m, which has a monomeric construct containing TadA*7.10 with a Y147T mutation (TadA*8.1). In some embodiments, the ABE8 is ABE8.2-m, which has a monomeric construct containing TadA*7.10 with a Y147R mutation (TadA*8.2). In some embodiments, the ABE8 is ABE8.3-m, which has a monomeric construct containing TadA*7.10 with a Q154S mutation (TadA*8.3). In some embodiments, the ABE8 is ABE8.4-m, which has a monomeric construct containing TadA*7.10 with a Y123H mutation (TadA*8.4). In some embodiments, the ABE8 is ABE8.5-m, which has a monomeric construct containing TadA*7.10 with a V82S mutation (TadA*8.5). In some embodiments, the ABE8 is ABE8.6-m, which has a monomeric construct containing TadA*7.10 with a T166R mutation (TadA*8.6). In some embodiments, the ABE8 is ABE8.7-m, which has a monomeric construct containing TadA*7.10 with a Q154R mutation (TadA*8.7). In some embodiments, the ABE8 is ABE8.8-m, which has a monomeric construct containing TadA*7.10 with Y147R, Q154R, and Y123H mutations (TadA*8.8). In some embodiments, the ABE8 is ABE8.9-m, which has a monomeric construct containing TadA*7.10 with Y147R, Q154R and I76Y mutations (TadA*8.9). In some embodiments, the ABE8 is ABE8.10-m, which has a monomeric construct containing TadA*7.10 with Y147R, Q154R, and T166R mutations (TadA*8.10). In some embodiments, the ABE8 is ABE8.11-m, which has a monomeric construct containing TadA*7.10 with Y147T and Q154R mutations (TadA*8.11). In some embodiments, the ABE8 is ABE8.12-m, which has a monomeric construct containing TadA*7.10 with Y147T and Q154S mutations (TadA*8.12).

[0764] In some embodiments, the ABE8 is ABE8.13-m, which has a monomeric construct containing TadA*7.10 with Y123H (Y123H reverted from H123Y), Y147R, Q154R and I76Y mutations (TadA*8.13). In some embodiments, the ABE8 is ABE8.14-m, which has a monomeric construct containing TadA*7.10 with I76Y and V82S mutations (TadA*8.14). In some embodiments, the ABE8 is ABE8.15-m, which has a monomeric construct containing TadA*7.10 with V82S and Y147R mutations (TadA*8.15). In some embodiments, the ABE8 is ABE8.16-m, which has a monomeric construct containing TadA*7.10 with V82S, Y123H (Y123H reverted from H123Y) and Y147R mutations (TadA*8.16). In some embodiments, the ABE8 is ABE8.17-m, which has a monomeric construct containing TadA*7.10 with V82S and Q154R mutations (TadA*8.17). In some embodiments, the ABE8 is ABE8.18-m, which has a monomeric construct containing TadA*7.10 with V82S, Y123H (Y123H reverted from H123Y) and Q154R mutations (TadA*8.18). In some embodiments, the ABE8 is ABE8.19-m, which has a monomeric construct containing TadA*7.10 with V82S, Y123H (Y123H reverted from H123Y), Y147R and Q154R mutations (TadA*8.19). In some embodiments, the ABE8 is ABE8.20-m, which has a monomeric construct containing TadA*7.10 with I76Y, V82S, Y123H (Y123H reverted from H123Y), Y147R and Q154R mutations (TadA*8.20). In some embodiments, the ABE8 is ABE8.21-m, which has a monomeric construct containing TadA*7.10 with Y147R and Q154S mutations (TadA*8.21). In some embodiments, the ABE8 is ABE8.22-m, which has a monomeric construct containing TadA*7.10 with V82S and Q154S mutations (TadA*8.22). In some embodiments, the ABE8 is ABE8.23-m, which has a monomeric construct containing TadA*7.10 with V82S and Y123H (Y123H reverted from H123Y) mutations (TadA*8.23). In some embodiments, the ABE8 is ABE8.24-m, which has a monomeric construct containing TadA*7.10 with V82S, Y123H (Y123H reverted from H123Y), and Y147T mutations (TadA*8.24).

[0765] In some embodiments, the ABE8 has a heterodimeric construct containing wild-type E. coli TadA fused to a TadA*8 variant (“ABE8.x-d”). In some embodiments, the ABE8 is ABE8.1-d, which has a heterodimeric construct containing wild-type E. coli TadA fused to TadA*7.10 with a Y147T mutation (TadA*8.1). In some embodiments, the ABE8 is ABE8.2-d, which has a heterodimeric construct containing wild-type E. coli TadA fused to TadA*7.10 with a Y147R mutation (TadA*8.2). In some embodiments, the ABE8 is ABE8.3-d, which has a heterodimeric construct containing wild-type E. coli TadA fused to TadA*7.10 with a Q154S mutation (TadA*8.3). In some embodiments, the ABE8 is ABE8.4-d, which has a heterodimeric construct containing wild-type E. coli TadA fused to TadA*7.10 with a Y123H mutation (TadA*8.4). In some embodiments, the ABE8 is ABE8.5-d, which has a heterodimeric construct containing wild-type E. coli TadA fused to TadA*7.10 with a V82S mutation (TadA*8.5). In some embodiments, the ABE8 is ABE8.6-d, which has a heterodimeric construct containing wild-type E. coli TadA fused to TadA*7.10 with a T166R mutation (TadA*8.6). In some embodiments, the ABE8 is ABE8.7-d, which has a heterodimeric construct containing wild-type E. coli TadA fused to TadA*7.10 with a Q154R mutation (TadA*8.7). In some embodiments, the ABE8 is ABE8.8-d, which has a heterodimeric construct containing wild-type E. coli TadA fused to TadA*7.10 with Y147R, Q154R, and Y123H mutations (TadA*8.8). In some embodiments, the ABE8 is ABE8.9-d, which has a heterodimeric construct containing wild-type E. coli TadA fused to TadA*7.10 with Y147R, Q154R and I76Y mutations (TadA*8.9). In some embodiments, the ABE8 is ABE8.10-d, which has a heterodimeric construct containing wild-type E. coli TadA fused to TadA*7.10 with Y147R, Q154R, and T166R mutations (TadA*8.10). In some embodiments, the ABE8 is ABE8.11-d, which has a heterodimeric construct containing wild-type E. coli TadA fused to TadA*7.10 with Y147T and Q154R mutations (TadA*8.11). In some embodiments, the ABE8 is ABE8.12-d, which has heterodimeric construct containing wild-type E. coli TadA fused to TadA*7.10 with Y147T and Q154S mutations (TadA*8.12). In some embodiments, the ABE8 is ABE8.13-d, which has a heterodimeric construct containing wild-type E. coli TadA fused to TadA*7.10 with Y123H (Y123H reverted from H123Y), Y147R, Q154R and I76Y mutations (TadA*8.13). In some embodiments, the ABE8 is ABE8.14-d, which has a heterodimeric construct containing wild-type E. coli TadA fused to TadA*7.10 with I76Y and V82S mutations (TadA*8.14). In some embodiments, the ABE8 is ABE8.15-d, which has a heterodimeric construct containing wild-type E. coli TadA fused to TadA*7.10 with V82S and Y147R mutations (TadA*8.15). In some embodiments, the ABE8 is ABE8.16-d, which has a heterodimeric construct containing wild-type E. coli TadA fused to TadA*7.10 with V82S, Y123H (Y123H reverted from H123Y) and Y147R mutations (TadA*8.16). In some embodiments, the ABE8 is ABE8.17-d, which has a heterodimeric construct containing wild-type E. coli TadA fused to TadA*7.10 with V82S and Q154R mutations (TadA*8.17). In some embodiments, the ABE8 is ABE8.18-d, which has a heterodimeric construct containing wild-type E. coli TadA fused to TadA*7.10 with V82S, Y123H (Y123H reverted from H123Y) and Q154R mutations (TadA*8.18). In some embodiments, the ABE8 is ABE8.19-d, which has a heterodimeric construct containing wild-type E. coli TadA fused to TadA*7.10 with V82S, Y123H (Y123H reverted from H123Y), Y147R and Q154R mutations (TadA*8.19). In some embodiments, the ABE8 is ABE8.20-d, which has a heterodimeric construct containing wild-type E. coli TadA fused to TadA*7.10 with I76Y, V82S, Y123H (Y123H reverted from H123Y), Y147R and Q154R mutations (TadA*8.20). In some embodiments, the ABE8 is ABE8.21-d, which has a heterodimeric construct containing wild-type E. coli TadA fused to TadA*7.10 with Y147R and Q154S mutations (TadA*8.21). In some embodiments, the ABE8 is ABE8.22-d, which has a heterodimeric construct containing wild-type E. coli TadA fused to TadA*7.10 with V82S and Q154S mutations (TadA*8.22). In some embodiments, the ABE8 is ABE8.23-d, which has a heterodimeric construct containing wild-type E. coli TadA fused to TadA*7.10 with V82S and Y123H (Y123H reverted from H123Y) mutations (TadA*8.23). In some embodiments, the ABE8 is ABE8.24-d, which has a heterodimeric construct containing wild-type E. coli TadA fused to TadA*7.10 with V82S, Y123H (Y123H reverted from H123Y), and Y147T mutations (TadA*8.24).

[0766] In some embodiments, the ABE8 has a heterodimeric construct containing TadA*7.10 fused to a TadA*8 variant (“ABE8.x-7”). In some embodiments, the ABE8 is ABE8.1-7, which has a heterodimeric construct containing TadA*7.10 fused to TadA*7.10 with a Y147T mutation (TadA*8.1). In some embodiments, the ABE8 is ABE8.2-7, which has a heterodimeric construct containing TadA*7.10 fused to TadA*7.10 with a Y147R mutation (TadA*8.2). In some embodiments, the ABE8 is ABE8.3-7, which has a heterodimeric construct containing TadA*7.10 fused to TadA*7.10 with a Q154S mutation (TadA*8.3). In some embodiments, the ABE8 is ABE8.4-7, which has a heterodimeric construct containing TadA*7.10 fused to TadA*7.10 with a Y123H mutation (TadA*8.4). In some embodiments, the ABE8 is ABE8.5-7, which has a heterodimeric construct containing TadA*7.10 fused to TadA*7.10 with a V82S mutation (TadA*8.5). In some embodiments, the ABE8 is ABE8.6-7, which has a heterodimeric construct containing TadA*7.10 fused to TadA*7.10 with a T166R mutation (TadA*8.6). In some embodiments, the ABE8 is ABE8.7-7, which has a heterodimeric construct containing TadA*7.10 fused to TadA*7.10 with a Q154R mutation (TadA*8.7). In some embodiments, the ABE8 is ABE8.8-7, which has a heterodimeric construct containing TadA*7.10 fused to TadA*7.10 with Y147R, Q154R, and Y123H mutations (TadA*8.8). In some embodiments, the ABE8 is ABE8.9-7, which has a heterodimeric construct containing TadA*7.10 fused to TadA*7.10 with Y147R, Q154R and I76Y mutations (TadA*8.9). In some embodiments, the ABE8 is ABE8.10-7, which has a heterodimeric construct containing TadA*7.10 fused to TadA*7.10 with Y147R, Q154R, and T166R mutations (TadA*8.10). In some embodiments, the ABE8 is ABE8.11-7, which has a heterodimeric construct containing TadA*7.10 fused to TadA*7.10 with Y147T and Q154R mutations (TadA*8.11). In some embodiments, the ABE8 is ABE8.12-7, which has a heterodimeric construct containing TadA*7.10 fused to TadA*7.10 with Y147T and Q154S mutations (TadA*8.12). In some embodiments, the ABE8 is ABE8.13-7, which has a heterodimeric construct containing TadA*7.10 fused to TadA*7.10 with Y123H (Y123H reverted from H123Y), Y147R, Q154R and I76Y mutations (TadA*8.13). In some embodiments, the ABE8 is ABE8.14-7, which has a heterodimeric construct containing TadA*7.10 fused to TadA*7.10 with I76Y and V82S mutations (TadA*8.14). In some embodiments, the ABE8 is ABE8.15-7, which has a heterodimeric construct containing TadA*7.10 fused to TadA*7.10 with V82S and Y147R mutations (TadA*8.15). In some embodiments, the ABE8 is ABE8.16-7, which has a heterodimeric construct containing TadA*7.10 fused to TadA*7.10 with V82S, Y123H (Y123H reverted from H123Y) and Y147R mutations (TadA*8.16). In some embodiments, the ABE8 is ABE8.17-7, which has a heterodimeric construct containing TadA*7.10 fused to TadA*7.10 with V82S and Q154R mutations (TadA*8.17). In some embodiments, the ABE8 is ABE8.18-7, which has a heterodimeric construct containing TadA*7.10 fused to TadA*7.10 with V82S, Y123H (Y123H reverted from H123Y) and Q154R mutations (TadA*8.18). In some embodiments, the ABE8 is ABE8.19-7, which has a heterodimeric construct containing TadA*7.10 fused to TadA*7.10 with V82S, Y123H (Y123H reverted from H123Y), Y147R and Q154R mutations (TadA*8.19). In some embodiments, the ABE8 is ABE8.20-7, which has a heterodimeric construct containing TadA*7.10 fused to TadA*7.10 with I76Y, V82S, Y123H (Y123H reverted from H123Y), Y147R and Q154R mutations (TadA*8.20). In some embodiments, the ABE8 is ABE8.21-7, which has a heterodimeric construct containing TadA*7.10 fused to TadA*7.10 with Y147R and Q154S mutations (TadA*8.21). In some embodiments, the ABE8 is ABE8.22-7, which has a heterodimeric construct containing TadA*7.10 fused to TadA*7.10 with V82S and Q154S mutations (TadA*8.22). In some embodiments, the ABE8 is ABE8.23-7, which has a heterodimeric construct containing TadA*7.10 fused to TadA*7.10 with V82S and Y123H (Y123H reverted from H123Y) mutations (TadA*8.23). In some embodiments, the ABE8 is ABE8.24-7, which has a heterodimeric construct containing TadA*7.10 fused to TadA*7.10 with V82S, Y123H (Y123H reverted from H123Y), and Y147T mutations (TadA*8.24).

[0767] In some embodiments, the ABE is ABE8.1-m, ABE8.2-m, ABE8.3-m, ABE8.4-m, ABE8.5-m, ABE8.6-m, ABE8.7-m, ABE8.8-m, ABE8.9-m, ABE8.10-m, ABE8.11-m, ABE8.12-m, ABE8.13-m, ABE8.14-m, ABE8.15-m, ABE8.16-m, ABE8.17-m, ABE8.18-m, ABE8.19-m, ABE8.20-m, ABE8.21-m, ABE8.22-m, ABE8.23-m, ABE8.24-m, ABE8.1-d, ABE8.2-d, ABE8.3-d, ABE8.4-d, ABE8.5-d, ABE8.6-d, ABE8.7-d, ABE8.8-d, ABE8.9-d, ABE8.10-d, ABE8.11-d, ABE8.12-d, ABE8.13-d, ABE8.14-d, ABE8.15-d, ABE8.16-d, ABE8.17-d, ABE8.18-d, ABE8.19-d, ABE8.20-d, ABE8.21-d, ABE8.22-d, ABE8.23-d, or ABE8.24-d as shown in Table 11 below.

TABLE 11
Adenosine Deaminase Base Editor 8 (ABE8) Variants

| | Adenosine | |
|---|---|---|
| ABE8 | Deaminase | Adenosine Deaminase Description |
| ABE8.1-m | TadA*8.1 | Monomer_TadA*7.10 + Y147T |
| ABE8.2-m | TadA*8.2 | Monomer_TadA*7.10 + Y147R |
| ABE8.3-m | TadA*8.3 | Monomer_TadA*7.10 + Q154S |
| ABE8.4-m | TadA*8.4 | Monomer_TadA*7.10 + Y123H |
| ABE8.5-m | TadA*8.5 | Monomer_TadA*7.10 + V82S |
| ABE8.6-m | TadA*8.6 | Monomer_TadA*7.10 + T166R |
| ABE8.7-m | TadA*8.7 | Monomer_TadA*7.10 + Q154R |
| ABE8.8-m | TadA*8.8 | Monomer_TadA*7.10 + Y147R_Q154R_Y123H |
| ABE8.9-m | TadA*8.9 | Monomer_TadA*7.10 + Y147R_Q154R_I76Y |
| ABE8.10-m | TadA*8.10 | Monomer_TadA*7.10 + Y147R_Q154R_T166R |
| ABE8.11-m | TadA*8.11 | Monomer_TadA*7.10 + Y147T_Q154R |
| ABE8.12-m | TadA*8.12 | Monomer_TadA*7.10 + Y147T_Q154S |
| ABE8.13-m | TadA*8.13 | Monomer_TadA*7.10 + Y123H_Y147R_Q154R_I76Y |
| ABE8.14-m | TadA*8.14 | Monomer_TadA*7.10 + I76Y_V82S |
| ABE8.15-m | TadA*8.15 | Monomer_TadA*7.10 + V82S_Y147R |
| ABE8.16-m | TadA*8.16 | Monomer_TadA*7.10 + V82S_Y123H_Y147R |
| ABE8.17-m | TadA*8.17 | Monomer_TadA*7.10 + V82S_Q154R |
| ABE8.18-m | TadA*8.18 | Monomer_TadA*7.10 + V82S_Y123H_Q154R |
| ABE8.19-m | TadA*8.19 | Monomer_TadA*7.10 + V82S_Y123H_Y147R_Q154R |
| ABE8.20-m | TadA*8.20 | Monomer_TadA*7.10 + |
| | | I76Y_V82S_Y123H_Y147R_Q154R |
| ABE8.21-m | TadA*8.21 | Monomer_TadA*7.10 + Y147R_Q154S |
| ABE8.22-m | TadA*8.22 | Monomer_TadA*7.10 + V82S_Q154S |
| ABE8.23-m | TadA*8.23 | Monomer_TadA*7.10 + V82S_Y123H |
| ABE8.24-m | TadA*8.24 | Monomer_TadA*7.10 + V82S_Y123H_Y147T |
| ABE8.1-d | TadA*8.1 | Heterodimer_(WT) + (TadA*7.10 + Y147T) |
| ABE8.2-d | TadA*8.2 | Heterodimer_(WT) + (TadA*7.10 + Y147R) |
| ABE8.3-d | TadA*8.3 | Heterodimer_(WT) + (TadA*7.10 + Q154S) |
| ABE8.4-d | TadA*8.4 | Heterodimer_(WT) + (TadA*7.10 + Y123H) |
| ABE8.5-d | TadA*8.5 | Heterodimer_(WT) + (TadA*7.10 + V82S) |
| ABE8.6-d | TadA*8.6 | Heterodimer_(WT) + (TadA*7.10 + T166R) |
| ABE8.7-d | TadA*8.7 | Heterodimer_(WT) + (TadA*7.10 + Q154R) |
| ABE8.8-d | TadA*8.8 | Heterodimer_(WT) + (TadA*7.10 + |
| | | Y147R_Q154R_Y123H) |
| ABE8.9-d | TadA*8.9 | Heterodimer_(WT) + (TadA*7.10 + |
| | | Y147R_Q154R_I76Y) |
| ABE8.10-d | TadA*8.10 | Heterodimer_(WT) + (TadA*7.10 + |
| | | Y147R_Q154R_T166R) |
| ABE8.11-d | TadA*8.11 | Heterodimer_(WT) + (TadA*7.10 + Y147T_Q154R) |
| ABE8.12-d | TadA*8.12 | Heterodimer_(WT) + (TadA*7.10 + Y147T_Q154S) |
| ABE8.13-d | TadA*8.13 | Heterodimer_(WT) + (TadA*7.10 + |
| | | Y123H_Y147T_Q154R_I76Y) |
| ABE8.14-d | TadA*8.14 | Heterodimer_(WT) + (TadA*7.10 + I76Y_V82S) |
| ABE8.15-d | TadA*8.15 | Heterodimer_(WT) + (TadA*7.10 + V82S_Y147R) |
| ABE8.16-d | TadA*8.16 | Heterodimer_(WT) + (TadA*7.10 + |
| | | V82S_Y123H_Y147R) |
| ABE8.17-d | TadA*8.17 | Heterodimer_(WT) + (TadA*7.10 + V82S_Q154R) |
| ABE8.18-d | TadA*8.18 | Heterodimer_(WT) + (TadA*7.10 + |
| | | V82S_Y123H_Q154R) |
| ABE8.19-d | TadA*8.19 | Heterodimer_(WT) + (TadA*7.10 + |
| | | V82S_Y123H_Y147R_Q154R) |
| ABE8.20-d | TadA*8.20 | Heterodimer_(WT) + (TadA*7.10 + |
| | | I76Y_V82S_Y123H_Y147R_Q154R) |
| ABE8.21-d | TadA*8.21 | Heterodimer_(WT) + (TadA*7.10 + Y147R_Q154S) |
| ABE8.22-d | TadA*8.22 | Heterodimer_(WT) + (TadA*7.10 + V82S_Q154S) |
| ABE8.23-d | TadA*8.23 | Heterodimer_(WT) + (TadA*7.10 + V82S_Y123H) |
| ABE8.24-d | TadA*8.24 | Heterodimer_(WT) + (TadA*7.10 + |
| | | V82S_Y123H_Y147T) |

[0768] In some embodiments, the ABE8 is ABE8a-m, which has a monomeric construct containing TadA*7.10 with R26C, A109S, T111R, D119N, H122N, Y147D, F149Y, T166I, and D167N mutations (TadA*8a). In some embodiments, the ABE8 is ABE8b-m, which has a monomeric construct containing TadA*7.10 with V88A, A109S, T111R, D119N, H122N, F149Y, T166I, and D167N mutations (TadA*8b). In some embodiments, the ABE8 is ABE8c-m, which has a monomeric construct containing TadA*7.10 with R26C, A109S, T111R, D119N, H122N, F149Y, T166I, and D167N mutations (TadA*8c). In some embodiments, the ABE8 is ABE8d-m, which has a monomeric construct containing TadA*7.10 with V88A, T111R, D119N, and F149Y mutations (TadA*8d). In some embodiments, the ABE8 is ABE8e-m, which has a monomeric construct containing TadA*7.10 with A109S, T111R, D119N, H122N, Y147D, F149Y, T166I, and D167N mutations (TadA*8e).

[0769] In some embodiments, the ABE8 is ABE8a-d, which has a heterodimeric construct containing wild-type E. coli TadA fused to TadA*7.10 with R26C, A109S, T111R, D119, H122N, Y147D, F149Y, T166I, and D167N mutations (TadA*8a). In some embodiments, the ABE8 is ABE8b-d, which has a heterodimeric construct containing wild-type E. coli TadA fused to TadA*7.10 with V88A, A109S, T111R, D119N, H122N, F149Y, T166I, and D167N mutations (TadA*8b). In some embodiments, the ABE8 is ABE8c-d, which has a heterodimeric construct containing wild-type E. coli TadA fused to TadA*7.10 with R26C, A109S, T111R, D119N, H122N, F149Y, T166I, and D167N mutations (TadA*8c). In some embodiments, the ABE8 is ABE8d-d, which has a heterodimeric construct containing wild-type E. coli TadA fused to TadA*7.10 with V88A, T111R, D119N, and F149Y mutations (TadA*8d). In some embodiments, the ABE8 is ABE8e-d, which has a heterodimeric construct containing wild-type E. coli TadA fused to TadA*7.10 with A109S, T111R, D119N, H122N, Y147D, F149Y, T166I, and D167N mutations (TadA*8e).

[0770] In some embodiments, the ABE8 is ABE8a-7, which has a heterodimeric construct containing TadA*7.10 fused to TadA*7.10 with R26C, A109S, T111R, D119, H122N, Y147D, F149Y, T166I, and D167N mutations (TadA*8a). In some embodiments, the ABE8 is ABE8b-7, which has a heterodimeric construct containing TadA*7.10 fused to TadA*7.10 with V88A, A109S, T111R, D119N, H122N, F149Y, T166I, and D167N mutations (TadA*8b). In some embodiments, the ABE8 is ABE8c-7, which has a heterodimeric construct containing TadA*7.10 fused to TadA*7.10 with R26C, A109S, T111R, D119N, H122N, F149Y, T166I, and D167N mutations (TadA*8c). In some embodiments, the ABE8 is ABE8d-7, which has a heterodimeric construct containing TadA*7.10 fused to TadA*7.10 with V88A, T111R, D119N, and F149Y mutations (TadA*8d). In some embodiments, the ABE8 is ABE8e-7, which has a heterodimeric construct containing TadA*7.10 fused to TadA*7.10 with A109S, T111R, D119N, H122N, Y147D, F149Y, T166I, and D167N mutations (TadA*8e).

[0771] In some embodiments, the ABE is ABE8a-m, ABE8b-m, ABE8c-m, ABE8d-m, ABE8e-m, ABE8a-d, ABE8b-d, ABE8c-d, ABE8d-d, or ABE8e-d, as shown in Table 12 below. In some embodiments, the ABE is ABE8e-m or ABE8e-d. ABE8e shows efficient adenine base editing activity and low indel formation when used with Cas homologues other than SpCas9, for example, SaCas9, SaCas9-KKH, Cas12a homologues, e.g., LbCas12a, enAs-Cas12a, SpCas9-NG and circularly permuted CP1028-SpCas9 and CP1041-SpCas9. In addition to the mutations shown for ABE8e in Table 12, off-target RNA and DNA editing were reduced by introducing a V106W substitution into the TadA domain (as described in M. Richter et al., 2020, Nature Biotechnology, doi.org/10.1038/s41587-020-0453-z, the entire contents of which are incorporated by reference herein).

TABLE 12
Additional Adenosine Deaminase Base Editor 8 Variants. In the table,
“monomer” indicates an ABE comprising a single TadA*7.10 comprising the indicated
alterations and “heterodimer” indicates an ABE comprising a TadA*7.10 comprising the
indicated alterations fused to an E. coli TadA adenosine deaminase.

| ABE8 Base | Adenosine | |
|---|---|---|
| Editor | Deaminase | Adenosine Deaminase Description |
| ABE8a-m | TadA*8a | Monomer_TadA*7.10 + R26C + A109S + T111R + D119N + |
| | | H122N + Y147D + F149Y + T166I + D167N |
| ABE8b-m | TadA*8b | Monomer TadA*7.10 + V88A + A109S + T111R + D119N + |
| | | H122N + F149Y + T166I + D167N |
| ABE8c-m | TadA*8c | Monomer TadA*7.10 + R26C + A109S + T111R + D119N + |
| | | H122N + F149Y + T166I + D167N |
| ABE8d-m | TadA*8d | Monomer_TadA*7.10 + V88A + T111R + D119N + F149Y |
| ABE8e-m | TadA*8e | Monomer TadA*7.10 + A109S + T111R + D119N + H122N + |
| | | Y147D + F149Y + T166I + D167N |
| ABE8a-d | TadA*8a | Heterodimer_(WT) + (TadA*7.10 + R26C + A109S + T111R + |
| | | D119N + H122N + Y147D + F149Y + T166I + D167N) |
| ABE8b-d | TadA*8b | Heterodimer_(WT) + (TadA*7.10 + V88A + A109S + T111R + |
| | | D119N + H122N + F149Y + T166I + D167N) |
| ABE8c-d | TadA*8c | Heterodimer_(WT) + (TadA*7.10 + R26C + A109S + T111R + |
| | | D119N + H122N + F149Y + T166I + D167N) |
| ABE8d-d | TadA*8d | Heterodimer_(WT) + (TadA*7.10 + V88A + T111R + D119N + |
| | | F149Y) |
| ABE8e-d | TadA*8e | Heterodimer_(WT) + (TadA*7.10 + A109S + T111R + D119N + |
| | | H122N + Y147D + F149Y + T166I + D167N) |

[0772] In some embodiments, base editors (e.g., ABE8) are generated by cloning an adenosine deaminase variant (e.g., TadA*8) into a scaffold that includes a circular permutant Cas9 (e.g., CP5 or CP6) and a bipartite nuclear localization sequence. In some embodiments, the base editor (e.g., ABE7.9, ABE7.10, or ABE8) is an NGC PAM CP5 variant (S. pyogenes Cas9 or spVRQR Cas9). In some embodiments, the base editor (e.g., ABE7.9, ABE7.10, or ABE8) is an AGA PAM CP5 variant (S. pyogenes Cas9 or spVRQR Cas9). In some embodiments, the base editor (e.g., ABE7.9, ABE7.10, or ABE8) is an NGC PAM CP6 variant (S. pyogenes Cas9 or spVRQR Cas9). In some embodiments, the base editor (e.g. ABE7.9, ABE7.10, or ABE8) is an AGA PAM CP6 variant (S. pyogenes Cas9 or spVRQR Cas9).

[0773] In some embodiments, the ABE has a genotype as shown in Table 13 below.

TABLE 13
Genotypes of ABEs

| | 23 | 26 | 36 | 37 | 48 | \|49 | 51 | 72 | 84 | 87 | 105 | 108 | 123 | 125 | 142 | 145 | 147 | 152 | 155 | 156 | 157 | 161 |
|---|---|---|---|---|---|---|---|---|---|---|---|---|---|---|---|---|---|---|---|---|---|---|
| ABE7.9 | L | R | L | N | A | | L | N | F | S | V | N | Y | G | N | C | Y | P | V | F | N | K |
| ABE7.10 | R | R | L | N | A | | L | N | F | S | V | N | Y | G | A | C | Y | P | V | F | N | K |

As shown in Table 14 below, genotypes of 40 ABE8s are described. Residue positions in the evolved E. coli TadA portion of ABE are indicated. Mutational changes in ABE8 are shown when distinct from ABE7.10 mutations. In some embodiments, the ABE has a genotype of one of the ABEs as shown in Table 14 below.

TABLE 14
Residue Identity in Evolved TadA

| | 23 | 36 | 48 | 51 | 76 | 82 | 84 | 106 | 108 | 123 | 146 | 147 | 152 | 154 | 155 | 156 | 157 | 166 |
|---|---|---|---|---|---|---|---|---|---|---|---|---|---|---|---|---|---|---|
| ABE7.10 | R | L | A | L | I | V | F | V | N | Y | C | Y | P | Q | V | F | N | T |
| ABE8.1-m | | | | | | | | | | | | T | | | | | | |
| ABE8.2-m | | | | | | | | | | | | R | | | | | | |
| ABE8.3-m | | | | | | | | | | | | | | S | | | | |
| ABE8.4-m | | | | | | | | | | H | | | | | | | | |
| ABE8.5-m | | | | | | S | | | | | | | | | | | | |
| ABE8.6-m | | | | | | | | | | | | | | | | | | R |
| ABE8.7-m | | | | | | | | | | | | | | R | | | | |
| ABE8.8-m | | | | | | | | | | H | | R | | R | | | | |
| ABE8.9-m | | | | | Y | | | | | | | R | | R | | | | |
| ABE8.10- | | | | | | | | | | | | R | | R | | | | R |
| m | | | | | | | | | | | | | | | | | | |
| ABE8.11- | | | | | | | | | | | | T | | R | | | | |
| m | | | | | | | | | | | | | | | | | | |
| ABE8.12- | | | | | | | | | | | | T | | S | | | | |
| m | | | | | | | | | | | | | | | | | | |
| ABE8.13- | | | | | Y | | | | | H | | R | | R | | | | |
| m | | | | | | | | | | | | | | | | | | |
| ABE8.14- | | | | | Y | S | | | | | | | | | | | | |
| m | | | | | | | | | | | | | | | | | | |
| ABE8.15- | | | | | | S | | | | | | R | | | | | | |
| m | | | | | | | | | | | | | | | | | | |
| ABE8.16- | | | | | | S | | | | H | | R | | | | | | |
| m | | | | | | | | | | | | | | | | | | |
| ABE8.17- | | | | | | S | | | | | | | | R | | | | |
| m | | | | | | | | | | | | | | | | | | |
| ABE8.18- | | | | | | S | | | | H | | | | R | | | | |
| m | | | | | | | | | | | | | | | | | | |
| ABE8.19- | | | | | | S | | | | H | | R | | R | | | | |
| m | | | | | | | | | | | | | | | | | | |
| ABE8.20- | | | | | Y | S | | | | H | | R | | R | | | | |
| m | | | | | | | | | | | | | | | | | | |
| ABE8.21- | | | | | | | | | | | | R | | S | | | | |
| m | | | | | | | | | | | | | | | | | | |
| ABE8.22- | | | | | | S | | | | | | | | S | | | | |
| m | | | | | | | | | | | | | | | | | | |
| ABE8.23- | | | | | | S | | | | H | | | | | | | | |
| m | | | | | | | | | | | | | | | | | | |
| ABE8.24- | | | | | | S | | | | H | | T | | | | | | |
| m | | | | | | | | | | | | | | | | | | |
| ABE8.1-d | | | | | | | | | | | | T | | | | | | |
| ABE8.2-d | | | | | | | | | | | | R | | | | | | |
| ABE8.3-d | | | | | | | | | | | | | | S | | | | |
| ABE8.4-d | | | | | | | | | | H | | | | | | | | |
| ABE8.5-d | | | | | | S | | | | | | | | | | | | |
| ABE8.6-d | | | | | | | | | | | | | | | | | | R |
| ABE8.7-d | | | | | | | | | | | | | | R | | | | |
| ABE8.8-d | | | | | | | | | | H | | R | | R | | | | |
| ABE8.9-d | | | | | Y | | | | | | | R | | R | | | | |
| ABE8.10- | | | | | | | | | | | | R | | R | | | | R |
| d | | | | | | | | | | | | | | | | | | |
| ABE8.11- | | | | | | | | | | | | T | | R | | | | |
| d | | | | | | | | | | | | | | | | | | |
| ABE8.12- | | | | | | | | | | | | T | | S | | | | |
| d | | | | | | | | | | | | | | | | | | |
| ABE8.13- | | | | | Y | | | | | H | | R | | R | | | | |
| d | | | | | | | | | | | | | | | | | | |
| ABE8.14- | | | | | Y | S | | | | | | | | | | | | |
| d | | | | | | | | | | | | | | | | | | |
| ABE8.15- | | | | | | S | | | | | | R | | | | | | |
| d | | | | | | | | | | | | | | | | | | |
| ABE8.16- | | | | | | S | | | | H | | R | | | | | | |
| d | | | | | | | | | | | | | | | | | | |
| ABE8.17- | | | | | | S | | | | | | | | R | | | | |
| d | | | | | | | | | | | | | | | | | | |
| ABE8.18- | | | | | | S | | | | H | | | | R | | | | |
| d | | | | | | | | | | | | | | | | | | |
| ABE8.19- | | | | | | S | | | | H | | R | | R | | | | |
| d | | | | | | | | | | | | | | | | | | |
| ABE8.20- | | | | | Y | S | | | | H | | R | | R | | | | |
| d | | | | | | | | | | | | | | | | | | |
| ABE8.21- | | | | | | | | | | | | R | | S | | | | |
| d | | | | | | | | | | | | | | | | | | |
| ABE8.22- | | | | | | S | | | | | | | | S | | | | |
| d | | | | | | | | | | | | | | | | | | |
| ABE8.23- | | | | | | S | | | | H | | | | | | | | |
| d | | | | | | | | | | | | | | | | | | |
| ABE8.24- | | | | | | S | | | | H | | T | | | | | | |
| d | | | | | | | | | | | | | | | | | | |

[0774] In some embodiments, the base editor is ABE8.1, which comprises or consists essentially of the following sequence or a fragment thereof having adenosine deaminase activity:

ABE8.1_Y147T_CP5_NGC PAM_monomer
(SEQ ID NO: 1426)
MSEVEFSHEYWMRHALTLAKRARDEREVPVGAVLVLNNRVIGEGWNRAIGLHDPTAHAEI
MALRQGGLVMQNYRLIDATLYVTFEPCVMCAGAMIHSRIGRVVFGVRNAKTGAAGSLMDV
LHYPGMNHRVEITEGILADECAALLCTFFRMPRQVFNAQKKAQSSTDSGGSSGGSSGSET
PGTSESATPESSGGSSGGSEIGKATAKYFFYSNIMNFFKTEITLANGEIRKRPLIETNGETG
EIVWDKGRDFATVRKVLSMPQVNIVKKTEVQTGGFSKESILPKRNSDKLIARKKDWDPKK
YGGFMQPTVAYSVLVVAKVEKGKSKKLKSVKELLGITIMERSSFEKNPIDFLEAKGYKEVK
KDLIIKLPKYSLFELENGRKRMLASAKFLQKGNELALPSKYVNFLYLASHYEKLKGSPEDN
EQKQLFVEQHKHYLDEIIEQISEFSKRVILADANLDKVLSAYNKHRDKPIREQAENIIHLFTL
TNLGAPRAFKYFDTTIARKEYRSTKEVLDATLIHQSITGLYETRIDLSQLGGDGGSGGSGG
SGGSGGSGGSGGMDKKYSIGLAIGTNSVGWAVITDEYKVPSKKFKVLGNTDRHSIKKNLI
GALLFDSGETAEATRLKRTARRRYTRRKNRICYLQEIFSNEMAKVDDSFFHRLEESFLVEE
DKKHERHPIFGNIVDEVAYHEKYPTIYHLRKKLVDSTDKADLRLIYLALAHMIKFRGHFLIEG
DLNPDNSDVDKLFIQLVQTYNQLFEENPINASGVDAKAILSARLSKSRRLENLIAQLPGEK
KNGLFGNLIALSLGLTPNFKSNFDLAEDAKLQLSKDTYDDDLDNLLAQIGDQYADLFLAA
KNLSDAILLSDILRVNTEITKAPLSASMIKRYDEHHQDLTLLKALVRQQLPEKYKEIFFDQS
KNGYAGYIDGGASQEEFYKFIKPILEKMDGTEELLVKLNREDLLRKQRTFDNGSIPHQIHL
GELHAILRRQEDFYPFLKDNREKIEKILTFRIPYYVGPLARGNSRFAWMTRKSEETITPWNF
EEVVDKGASAQSFIERMTNFDKNLPNEKVLPKHSLLYEYFTVYNELTKVKYVTEGMRKPA
FLSGEQKKAIVDLLFKTNRKVTVKQLKEDYFKKIECFDSVEISGVEDRFNASLGTYHDLLKII
KDKDFLDNEENEDILEDIVLTLTLFEDREMIEERLKTYAHLFDDKVMKQLKRRRYTGWGRL
SRKLINGIRDKQSGKTILDFLKSDGFANRNFMQLIHDDSLTFKEDIQKAQVSGQGDSLHEHI
ANLAGSPAIKKGILQTVKVVDELVKVMGRHKPENIVIEMARENQTTQKGQKNSRERMKRI
EEGIKELGSQILKEHPVENTQLQNEKLYLYYLQNGRDMYVDQELDINRLSDYDVDHIVPQS
FLKDDSIDNKVLTRSDKNRGKSDNVPSEEVVKKMKNYWRQLLNAKLITQRKFDNLTKAER
GGLSELDKAGFIKRQLVETRQITKHVAQILDSRMNTKYDENDKLIREVKVITLKSKLVSDFR
KDFQFYKVREINNYHHAHDAYLNAVVGTALIKKYPKLESEFVYGDYKVYDVRKMIAKSEQ
EGADKRTADGSEFESPKKKRKV

[0775] In the above sequence, the plain text denotes an adenosine deaminase sequence, bold sequence indicates sequence derived from Cas9, the italicized sequence denotes a linker sequence, and the underlined sequence denotes a bipartite nuclear localization sequence. Other ABE8 sequences are provided in the attached sequence listing (SEQ ID NOs: 1427-1449).

[0776] In some embodiments, the base editor is a ninth generation ABE (ABE9). In some embodiments, the ABE9 contains a TadA*9 variant. ABE9 base editors include an adenosine deaminase variant comprising an amino acid sequence, which contains alterations relative to an ABE 7*10 reference sequence, as described herein. Exemplary ABE9 variants are listed in Table 15. Details of ABE9 base editors are described in International PCT Application No. PCT/2020/049975, which is incorporated herein by reference for its entirety.

TABLE 15
Adenosine Deaminase Base Editor 9 (ABE9) Variants. In the table,
“monomer” indicates an ABE comprising a single TadA*7.10 comprising the indicated
alterations and “heterodimer” indicates an ABE comprising a TadA*7.10 comprising
the indicated alterations fused to an E. coli TadA adenosine deaminase.

| ABE9 Description | Alterations |
|---|---|
| ABE9.1_monomer | E25F, V82S, Y123H, T133K, Y147R, Q154R |
| ABE9.2_monomer | E25F, V82S, Y123H, Y147R, Q154R |
| ABE9.3_monomer | V82S, Y123H, P124W, Y147R, Q154R |
| ABE9.4_monomer | L51W, V82S, Y123H, C146R, Y147R, Q154R |
| ABE9.5_monomer | P54C, V82S, Y123H, Y147R, Q154R |
| ABE9.6_monomer | Y73S, V82S, Y123H, Y147R, Q154R |
| ABE9.7_monomer | N38G, V82T, Y123H, Y147R, Q154R |
| ABE9.8_monomer | R23H, V82S, Y123H, Y147R, Q154R |
| ABE9.9_monomer | R21N, V82S, Y123H, Y147R, Q154R |
| ABE9.10_monomer | V82S, Y123H, Y147R, Q154R, A158K |
| ABE9.11_monomer | N72K, V82S, Y123H, D139L, Y147R, Q154R, |
| ABE9.12_monomer | E25F, V82S, Y123H, D139M, Y147R, Q154R |
| ABE9.13_monomer | M70V, V82S, M94V, Y123H, Y147R, Q154R |
| ABE9.14_monomer | Q71M, V82S, Y123H, Y147R, Q154R |
| ABE9.15_heterodimer | E25F, V82S, Y123H, T133K, Y147R, Q154R |
| ABE9.16_heterodimer | E25F, V82S, Y123H, Y147R, Q154R |
| ABE9.17_heterodimer | V82S, Y123H, P124W, Y147R, Q154R |
| ABE9.18_heterodimer | L51W, V82S, Y123H, C146R, Y147R, Q154R |
| ABE9.19_heterodimer | P54C, V82S, Y123H, Y147R, Q154R |
| ABE9.2_heterodimer | Y73S, V82S, Y123H, Y147R, Q154R |
| ABE9.21_heterodimer | N38G, V82T, Y123H, Y147R, Q154R |
| ABE9.22_heterodimer | R23H, V82S, Y123H, Y147R, Q154R |
| ABE9.23_heterodimer | R21N, V82S, Y123H, Y147R, Q154R |
| ABE9.24_heterodimer | V82S, Y123H, Y147R, Q154R, A158K |
| ABE9.25_heterodimer | N72K, V82S, Y123H, D139L, Y147R, Q154R, |
| ABE9.26_heterodimer | E25F, V82S, Y123H, D139M, Y147R, Q154R |
| ABE9.27_heterodimer | M70V, V82S, M94V, Y123H, Y147R, Q154R |
| ABE9.28_heterodimer | Q71M, V82S, Y123H, Y147R, Q154R |
| ABE9.29_monomer | E25F_I76Y_V82S_Y123H_Y147R_Q154R |
| ABE9.30_monomer | I76Y_V82T_Y123H_Y147R_Q154R |
| ABE9.31_monomer | N38G_I76Y_V82S_Y123H_Y147R_Q154R |
| ABE9.32_monomer | N38G_I76Y_V82T_Y123H_Y147R_Q154R |
| ABE9.33_monomer | R23H_I76Y_V82S_Y123H_Y147R_Q154R |
| ABE9.34_monomer | P54C_I76Y_V82S_Y123H_Y147R_Q154R |
| ABE9.35_monomer | R21N_I76Y_V82S_Y123H_Y147R_Q154R |
| ABE9.36_monomer | I76Y_V82S_Y123H_D138M_Y147R_Q154R |
| ABE9.37_monomer | Y72S_I76Y_V82S_Y123H_Y147R_Q154R |
| ABE9.38_heterodimer | E25F_I76Y_V82S_Y123H_Y147R_Q154R |
| ABE9.39_heterodimer | I76Y_V82T_Y123H_Y147R_Q154R |
| ABE9.40_heterodimer | N38G_I76Y_V82S_Y123H_Y147R_Q154R |
| ABE9.41_heterodimer | N38G_I76Y_V82T_Y123H_Y147R_Q154R |
| ABE9.42_heterodimer | R23H_I76Y_V82S_Y123H_Y147R_Q154R |
| ABE9.43_heterodimer | P54C_I76Y_V82S_Y123H_Y147R_Q154R |
| ABE9.44_heterodimer | R21N_I76Y_V82S_Y123H_Y147R_Q154R |
| ABE9.45_heterodimer | I76Y_V82S_Y123H_D138M_Y147R_Q154R |
| ABE9.46_heterodimer | Y72S_I76Y_V82S_Y123H_Y147R_Q154R |
| ABE9.47_monomer | N72K_V82S, Y123H, Y147R, Q154R |
| ABE9.48_monomer | Q71M_V82S, Y123H, Y147R, Q154R |
| ABE9.49_monomer | M70V, V82S, M94V, Y123H, Y147R, Q154R |
| ABE9.50_monomer | V82S, Y123H, T133K, Y147R, Q154R |
| ABE9.51_monomer | V82S, Y123H, T133K, Y147R, Q154R, A158K |
| ABE9.52_monomer | M70V, Q71M, N72K, V82S, Y123H, Y147R,Q154R |
| ABE9.53_heterodimer | N72K_V82S, Y123H, Y147R, Q154R |
| ABE9.54_heterodimer | Q71M_V82S, Y123H, Y147R, Q154R |
| ABE9.55_heterodimer | M70V, V82S, M94V, Y123H, Y147R, Q154R |
| ABE9.56_heterodimer | V82S, Y123H, T133K, Y147R, Q154R |
| ABE9.57_heterodimer | V82S, Y123H, T133K, Y147R, Q154R, A158K |
| ABE9.58_heterodimer | M70V, Q71M, N72K, V82S, Y123H, Y147R, Q154R |

[0777] In some embodiments, the base editor comprises a domain comprising all or a portion of a uracil glycosylase inhibitor (UGI). In some embodiments, the base editor comprises a domain comprising all or a portion of a nucleic acid polymerase. In some embodiments, a base editor can comprise as a domain all or a portion of a nucleic acid polymerase (NAP). For example, a base editor can comprise all or a portion of a eukaryotic NAP. In some embodiments, a NAP or portion thereof incorporated into a base editor is a DNA polymerase. In some embodiments, a NAP or portion thereof incorporated into a base editor has translesion polymerase activity. In some embodiments, a NAP or portion thereof incorporated into a base editor is a translesion DNA polymerase. In some embodiments, a NAP or portion thereof incorporated into a base editor is a Rev7, Rev1 complex, polymerase iota, polymerase kappa, or polymerase eta. In some embodiments, a NAP or portion thereof incorporated into a base editor is a eukaryotic polymerase alpha, beta, gamma, delta, epsilon, gamma, eta, iota, kappa, lambda, mu, or nu component. In some embodiments, a NAP or portion thereof incorporated into a base editor comprises an amino acid sequence that is at least 75%, 80%, 85%, 90%, 95%, 96%, 97%, 98%, 99%, or 99.5% identical to a nucleic acid polymerase (e.g., a translesion DNA polymerase). In some embodiments, a nucleic acid polymerase or portion thereof incorporated into a base editor is a translesion DNA polymerase.

[0778] In some embodiments, a domain of the base editor can comprise multiple domains. For example, the base editor comprising a polynucleotide programmable nucleotide binding domain derived from Cas9 can comprise a REC lobe and an NUC lobe corresponding to the REC lobe and NUC lobe of a wild-type or natural Cas9. In another example, the base editor can comprise one or more of a RuvCI domain, BH domain, REC1 domain, REC2 domain, RuvCII domain, L1 domain, HNH domain, L2 domain, RuvCIII domain, WED domain, TOPO domain or CTD domain. In some embodiments, one or more domains of the base editor comprise a mutation (e.g., substitution, insertion, deletion) relative to a wild-type version of a polypeptide comprising the domain. For example, an HNH domain of a polynucleotide programmable DNA binding domain can comprise an H840A substitution. In another example, a RuvCI domain of a polynucleotide programmable DNA binding domain can comprise a D10A substitution.

[0779] Different domains (e.g., adjacent domains) of the base editor disclosed herein can be connected to each other with or without the use of one or more linker domains (e.g., an XTEN linker domain). In some embodiments, a linker domain can be a bond (e.g., covalent bond), chemical group, or a molecule linking two molecules or moieties, e.g., two domains of a fusion protein, such as, for example, a first domain (e.g., Cas9-derived domain) and a second domain (e.g., an adenosine deaminase domain or a cytidine deaminase domain). In some embodiments, a linker is a covalent bond (e.g., a carbon-carbon bond, disulfide bond, carbon-hetero atom bond, etc.). In certain embodiments, a linker is a carbon nitrogen bond of an amide linkage. In certain embodiments, a linker is a cyclic or acyclic, substituted or unsubstituted, branched or unbranched aliphatic or heteroaliphatic linker. In certain embodiments, a linker is polymeric (e.g., polyethylene, polyethylene glycol, polyamide, polyester, etc.). In certain embodiments, a linker comprises a monomer, dimer, or polymer of aminoalkanoic acid. In some embodiments, a linker comprises an aminoalkanoic acid (e.g., glycine, ethanoic acid, alanine, beta-alanine, 3-aminopropanoic acid, 4-aminobutanoic acid, 5-pentanoic acid, etc.). In some embodiments, a linker comprises a monomer, dimer, or polymer of aminohexanoic acid (Ahx). In certain embodiments, a linker is based on a carbocyclic moiety (e.g., cyclopentane, cyclohexane). In other embodiments, a linker comprises a polyethylene glycol moiety (PEG). In certain embodiments, a linker comprises an aryl or heteroaryl moiety. In certain embodiments, the linker is based on a phenyl ring. A linker can include functionalized moieties to facilitate attachment of a nucleophile (e.g., thiol, amino) from the peptide to the linker. Any electrophile can be used as part of the linker. Exemplary electrophiles include, but are not limited to, activated esters, activated amides, Michael acceptors, alkyl halides, aryl halides, acyl halides, and isothiocyanates. In some embodiments, a linker joins a gRNA binding domain of an RNA-programmable nuclease, including a Cas9 nuclease domain, and the catalytic domain of a nucleic acid editing protein. In some embodiments, a linker joins a dCas9 and a second domain (e.g., UGI, etc.).

### Linkers

[0780] In certain embodiments, linkers may be used to link any of the peptides or peptide domains of the invention. The linker may be as simple as a covalent bond, or it may be a polymeric linker many atoms in length. In certain embodiments, the linker is a polypeptide or based on amino acids. In other embodiments, the linker is not peptide-like. In certain embodiments, the linker is a covalent bond (e.g., a carbon-carbon bond, disulfide bond, carbon-heteroatom bond, etc.). In certain embodiments, the linker is a carbon-nitrogen bond of an amide linkage. In certain embodiments, the linker is a cyclic or acyclic, substituted or unsubstituted, branched or unbranched aliphatic or heteroaliphatic linker. In certain embodiments, the linker is polymeric (e.g., polyethylene, polyethylene glycol, polyamide, polyester, etc.). In certain embodiments, the linker comprises a monomer, dimer, or polymer of aminoalkanoic acid. In certain embodiments, the linker comprises an aminoalkanoic acid (e.g., glycine, ethanoic acid, alanine, beta-alanine, 3-aminopropanoic acid, 4-aminobutanoic acid, 5-pentanoic acid, etc.). In certain embodiments, the linker comprises a monomer, dimer, or polymer of aminohexanoic acid (Ahx). In certain embodiments, the linker is based on a carbocyclic moiety (e.g., cyclopentane, cyclohexane). In other embodiments, the linker comprises a polyethylene glycol moiety (PEG). In other embodiments, the linker comprises amino acids. In certain embodiments, the linker comprises a peptide. In certain embodiments, the linker comprises an aryl or heteroaryl moiety. In certain embodiments, the linker is based on a phenyl ring. The linker may include functionalized moieties to facilitate attachment of a nucleophile (e.g., thiol, amino) from the peptide to the linker. Any electrophile may be used as part of the linker. Exemplary electrophiles include, but are not limited to, activated esters, activated amides, Michael acceptors, alkyl halides, aryl halides, acyl halides, and isothiocyanates.

[0781] Typically, a linker is positioned between, or flanked by, two groups, molecules, or other moieties and connected to each one via a covalent bond, thus connecting the two. In some embodiments, a linker is an amino acid or a plurality of amino acids (e.g., a peptide or protein). In some embodiments, a linker is an organic molecule, group, polymer, or chemical moiety. In some embodiments, a linker is 2-100 amino acids in length, for example, 2, 3, 4, 5, 6, 7, 8, 9, 10, 11, 12, 13, 14, 15, 16, 17, 18, 19, 20, 21, 22, 23, 24, 25, 26, 27, 28, 29, 30, 30-35, 35-40, 40-45, 45-50, 50-60, 60-70, 70-80, 80-90, 90-100, 100-150, or 150-200 amino acids in length. In some embodiments, the linker is about 3 to about 104 (e.g., 5, 6, 7, 8, 9, 10, 11, 12, 13, 14, 15, 16, 17, 18, 19, 20, 21, 22, 23, 24, 25, 26, 27, 28, 29, 30, 31, 32, 33, 34, 35, 36, 37, 38, 39, 40, 41, 42, 43, 44, 45, 46, 47, 48, 49, 50, 55, 60, 65, 70, 75, 80, 85, 90, 95, or 100) amino acids in length. Longer or shorter linkers are also contemplated.

[0782] In some embodiments, any of the fusion proteins provided herein, comprise a cytidine or adenosine deaminase and a Cas9 domain that are fused to each other via a linker. Various linker lengths and flexibilities between the cytidine or adenosine deaminase and the Cas9 domain can be employed (e.g., ranging from very flexible linkers of the form (GGGS)n (SEQ ID NO: 1308), (GGGGS)n (SEQ ID NO: 109), and (G)n to more rigid linkers of the form (EAAAK)n (SEQ ID NO: 1309), (SGGS)n (SEQ ID NO: 57), SGSETPGTSESATPES (SEQ ID NO: 56) (see, e.g., Guilinger J P, et al. Fusion of catalytically inactive Cas9 to FokI nuclease improves the specificity of genome modification. Nat. Biotechnol. 2014; 32(6): 577-82; the entire contents are incorporated herein by reference) and (XP)n) in order to achieve the optimal length for activity for the cytidine or adenosine deaminase nucleobase editor. In some embodiments, n is 1, 2, 3, 4, 5, 6, 7, 8, 9, 10, 11, 12, 13, 14, or 15. In some embodiments, the linker comprises a (GGS)n motif, wherein n is 1, 3, or 7. In some embodiments, cytidine deaminase or adenosine deaminase and the Cas9 domain of any of the fusion proteins provided herein are fused via a linker comprising the amino acid sequence SGSETPGTSESATPES (SEQ ID NO: 56), which can also be referred to as the XTEN linker. In some embodiments, a linker comprises a plurality of proline residues and is 5-21, 5-14, 5-9, 5-7 amino acids in length, e.g., PAPAP (SEQ ID NO: 65), PAPAPA (SEQ ID NO: 66), PAPAPAP (SEQ ID NO: 67), PAPAPAPA (SEQ ID NO: 68), P(AP)4 (SEQ ID NO: 69), P(AP)7 (SEQ ID NO: 70), P(AP)10 (SEQ ID NO: 71) (see, e.g., Tan J, Zhang F, Karcher D, Bock R. Engineering of high-precision base editors for site-specific single nucleotide replacement. Nat Commun. 2019 Jan. 25; 10(1):439; the entire contents are incorporated herein by reference). Such proline-rich linkers are also termed “rigid” linkers.

[0783] In another embodiment, the base editor system comprises a component (protein) that interacts non-covalently with a deaminase (DNA deaminase), e.g., an adenosine or a cytidine deaminase, and transiently attracts the adenosine or cytidine deaminase to the target nucleobase in a target polynucleotide sequence for specific editing, with minimal or reduced bystander or target-adjacent effects. Such a non-covalent system and method involving deaminase-interacting proteins serves to attract a DNA deaminase to a particular genomic target nucleobase and decouples the events of on-target and target-adjacent editing, thus enhancing the achievement of more precise single base substitution mutations. In an embodiment, the deaminase-interacting protein binds to the deaminase (e.g., adenosine deaminase or cytidine deaminase) without blocking or interfering with the active (catalytic) site of the deaminase from engaging the target nucleobase (e.g., adenosine or cytidine, respectively). Such as system, termed “MagnEdit,” involves interacting proteins tethered to a Cas9 and gRNA complex and can attract a co-expressed adenosine or cytidine deaminase (either exogenous or endogenous) to edit a specific genomic target site, and is described in McCann, J. et al., 2020, “MagnEdit—interacting factors that recruit DNA-editing enzymes to single base targets,” Life-Science-Alliance, Vol. 3, No. 4 (e201900606), (doi 10.26508/lsa.201900606), the contents of which are incorporated by reference herein in their entirety. In an embodiment, the DNA deaminase is an adenosine deaminase variant (e.g., TadA*8) as described herein.

[0784] In another embodiment, a system called “Suntag,” involves non-covalently interacting components used for recruiting protein (e.g., adenosine deaminase or cytidine deaminase) components, or multiple copies thereof, of base editors to polynucleotide target sites to achieve base editing at the site with reduced adjacent target editing, for example, as described in Tanenbaum, M. E. et al., “A protein tagging system for signal amplification in gene expression and fluorescence imaging,” Cell. 2014 Oct. 23; 159(3): 635-646. doi:10.1016/j.cell.2014.09.039; and in Huang, Y.-H. et al., 2017, “DNA epigenome editing using CRISPR-Cas SunTag-directed DNMT3A,” Genome Biol 18: 176. doi:10.1186/s13059-017-1306-z, the contents of each of which are incorporated by reference herein in their entirety. In an embodiment, the DNA deaminase is an adenosine deaminase variant (e.g., TadA*8) as described herein.

Nucleic Acid Programmable DNA Binding Proteins with Guide RNAs

[0785] Provided herein are compositions and methods for base editing in cells. Further provided herein are compositions comprising a guide polynucleic acid sequence, e.g. a guide RNA sequence, or a combination of 2, 3, 4, 5, 6, 7, 8, 9, 10, 11, 12, 13, 14, 15, 16, 17, 18, 19, 20, or more guide RNAs as provided herein. In some embodiments, a composition for base editing as provided herein further comprises a polynucleotide that encodes a base editor, e.g. a C-base editor or an A-base editor. For example, a composition for base editing may comprise a mRNA sequence encoding a BE, a BE4, an ABE, and a combination of one or more guide RNAs as provided. A composition for base editing may comprise a base editor polypeptide and a combination of one or more of any guide RNAs provided herein. Such a composition may be used to effect base editing in a cell through different delivery approaches, for example, electroporation, nucleofection, viral transduction or transfection. In some embodiments, the composition for base editing comprises an mRNA sequence that encodes a base editor and a combination of one or more guide RNA sequences provided herein for electroporation.

[0786] Some aspects of this disclosure provide complexes comprising any of the fusion proteins provided herein, and a guide RNA bound to a nucleic acid programmable DNA binding protein (napDNAbp) domain (e.g., a Cas9 (e.g., a dCas9, a nuclease active Cas9, or a Cas9 nickase) or Cas12) of the fusion protein. These complexes are also termed ribonucleoproteins (RNPs). In some embodiments, the guide nucleic acid (e.g., guide RNA) is from 15-100 nucleotides long and comprises a sequence of at least 10 contiguous nucleotides that is complementary to a target sequence. In some embodiments, the guide RNA is 15, 16, 17, 18, 19, 20, 21, 22, 23, 24, 25, 26, 27, 28, 29, 30, 31, 32, 33, 34, 35, 36, 37, 38, 39, 40, 41, 42, 43, 44, 45, 46, 47, 48, 49, or 50 nucleotides long. In some embodiments, the guide RNA comprises a sequence of 15, 16, 17, 18, 19, 20, 21, 22, 23, 24, 25, 26, 27, 28, 29, 30, 31, 32, 33, 34, 35, 36, 37, 38, 39, or 40 contiguous nucleotides that is complementary to a target sequence. In some embodiments, the target sequence is a DNA sequence. In some embodiments, the target sequence is an RNA sequence. In some embodiments, the target sequence is a sequence in the genome of a bacteria, yeast, fungi, insect, plant, or animal. In some embodiments, the target sequence is a sequence in the genome of a human. In some embodiments, the 3′ end of the target sequence is immediately adjacent to a canonical PAM sequence (NGG). In some embodiments, the 3′ end of the target sequence is immediately adjacent to a non-canonical PAM sequence (e.g., a sequence listed in Table 6 or 5′-NAA-3′). In some embodiments, the guide nucleic acid (e.g., guide RNA) is complementary to a sequence in a gene of interest (e.g., a gene associated with a disease or disorder).

[0787] Some aspects of this disclosure provide methods of using the fusion proteins, or complexes provided herein. For example, some aspects of this disclosure provide methods comprising contacting a DNA molecule with any of the fusion proteins provided herein, and with at least one guide RNA, wherein the guide RNA is about 15-100 nucleotides long and comprises a sequence of at least 10 contiguous nucleotides that is complementary to a target sequence. In some embodiments, the 3′ end of the target sequence is immediately adjacent to an AGC, GAG, TTT, GTG, or CAA sequence. In some embodiments, the 3′ end of the target sequence is immediately adjacent to an NGA, NGCG, NGN, NNGRRT, NNNRRT, NGCG, NGCN, NGTN, NGTN, NGTN, or 5′ (TTTV) sequence. In some embodiments, the 3′ end of the target sequence is immediately adjacent to an e.g., TTN, DTTN, GTTN, ATTN, ATTC, DTTNT, WTTN, HATY, TTTN, TTTV, TTTC, TG, RTR, or YTN PAM site.

[0788] It will be understood that the numbering of the specific positions or residues in the respective sequences depends on the particular protein and numbering scheme used. Numbering might differ, e.g., in precursors of a mature protein and the mature protein itself, and differences in sequences from species to species may affect numbering. One of skill in the art will be able to identify the respective residue in any homologous protein and in the respective encoding nucleic acid by methods well known in the art, e.g., by sequence alignment and determination of homologous residues.

[0789] It will be apparent to those of skill in the art that in order to target any of the fusion proteins disclosed herein, to a target site, e.g., a site comprising a mutation to be edited, it is typically necessary to co-express the fusion protein together with a guide RNA. As explained in more detail elsewhere herein, a guide RNA typically comprises a tracrRNA framework allowing for napDNAbp (e.g., Cas9 or Cas12) binding, and a guide sequence, which confers sequence specificity to the napDNAbp:nucleic acid editing enzyme/domain fusion protein. Alternatively, the guide RNA and tracrRNA may be provided separately, as two nucleic acid molecules. In some embodiments, the guide RNA comprises a structure, wherein the guide sequence comprises a sequence that is complementary to the target sequence. The guide sequence is typically 20 nucleotides long. The sequences of suitable guide RNAs for targeting napDNAbp:nucleic acid editing enzyme/domain fusion proteins to specific genomic target sites will be apparent to those of skill in the art based on the instant disclosure. Such suitable guide RNA sequences typically comprise guide sequences that are complementary to a nucleic sequence within 50 nucleotides upstream or downstream of the target nucleotide to be edited. Some exemplary guide RNA sequences suitable for targeting any of the provided fusion proteins to specific target sequences are provided herein.

[0790] Distinct portions of sgRNA are predicted to form various features that interact with Cas9 (e.g., SpyCas9) and/or the DNA target. Six conserved modules have been identified within native crRNA:tracrRNA duplexes and single guide RNAs (sgRNAs) that direct Cas9 endonuclease activity (see Briner et al., Guide RNA Functional Modules Direct Cas9 Activity and Orthogonality Mol Cell. 2014 Oct. 23; 56(2):333-339). The six modules include the spacer responsible for DNA targeting, the upper stem, bulge, lower stem formed by the CRISPR repeat:tracrRNA duplex, the nexus, and hairpins from the 3′ end of the tracrRNA. The upper and lower stems interact with Cas9 mainly through sequence-independent interactions with the phosphate backbone. In some embodiments, the upper stem is dispensable. In some embodiments, the conserved uracil nucleotide sequence at the base of the lower stem is dispensable. The bulge participates in specific side-chain interactions with the Red domain of Cas9. The nucleobase of U44 interacts with the side chains of Tyr 325 and His 328, while G43 interacts with Tyr 329. The nexus forms the core of the sgRNA:Cas9 interactions and lies at the intersection between the sgRNA and both Cas9 and the target DNA. The nucleobases of A51 and A52 interact with the side chain of Phe 1105; U56 interacts with Arg 457 and Asn 459; the nucleobase of U59 inserts into a hydrophobic pocket defined by side chains of Arg 74, Asn 77, Pro 475, Leu 455, Phe 446, and Ile 448; C60 interacts with Leu 455, Ala 456, and Asn 459, and C61 interacts with the side chain of Arg 70, which in turn interacts with C15. In some embodiments, one or more of these mutations are made in the bulge and/or the nexus of a sgRNA for a Cas9 (e.g., spyCas9) to optimize sgRNA:Cas9 interactions.

[0791] Moreover, the tracrRNA nexus and hairpins are critical for Cas9 pairing and can be swapped to cross orthogonality barriers separating disparate Cas9 proteins, which is instrumental for further harnessing of orthogonal Cas9 proteins. In some embodiments, the nexus and hairpins are swapped to target orthogonal Cas9 proteins. In some embodiments, a sgRNA is dispensed of the upper stem, hairpin 1, and/or the sequence flexibility of the lower stem to design a guide RNA that is more compact and conformationally stable. In some embodiments, the modules are modified to optimize multiplex editing using a single Cas9 with various chimeric guides or by concurrently using orthogonal systems with different combinations of chimeric sgRNAs. Details regarding guide functional modules and methods thereof are described, for example, in Briner et al., Guide RNA Functional Modules Direct Cas9 Activity and Orthogonality Mol Cell. 2014 Oct. 23; 56(2):333-339, the contents of which is incorporated by reference herein in its entirety.

[0792] The domains of the base editor disclosed herein can be arranged in any order. Non-limiting examples of a base editor comprising a fusion protein comprising e.g., a polynucleotide-programmable nucleotide-binding domain (e.g., Cas9 or Cas12) and a deaminase domain (e.g., cytidine or adenosine deaminase) can be arranged as follows:
[0793] NH2-[nucleobase editing domain]-Linker1-[nucleobase editing domain]-COOH;
[0794] NH2-[deaminase]-Linker1-[nucleobase editing domain]-COOH;
[0795] NH2-[deaminase]-Linker1-[nucleobase editing domain]-Linker2-[UGI]-COOH;
[0796] NH2-[deaminase]-Linker1-[nucleobase editing domain]-COOH;
[0797] NH2-[adenosine deaminase]-Linker1-[nucleobase editing domain]-COOH;
[0798] NH2-[nucleobase editing domain]-[deaminase]-COOH;
[0799] NH2-[deaminase]-[nucleobase editing domain]-[inosine BER inhibitor]-COOH;
[0800] NH2-[deaminase]-[inosine BER inhibitor]-[nucleobase editing domain]-COOH;
[0801] NH2-[inosine BER inhibitor]-[deaminase]-[nucleobase editing domain]-COOH;
[0802] NH2-[nucleobase editing domain]-[deaminase]-[inosine BER inhibitor]-COOH;
[0803] NH2-[nucleobase editing domain]-[inosine BER inhibitor]-[deaminase]-COOH;
[0804] NH2-[inosine BER inhibitor]-[nucleobase editing domain]-[deaminase]-COOH;
[0805] NH2-[nucleobase editing domain]-Linker1-[deaminase]-Linker2-[nucleobase editing domain]-COOH;
[0806] NH2-[nucleobase editing domain]-Linker1-[deaminase]-[nucleobase editing domain]-COOH;
[0807] NH2-[nucleobase editing domain]-[deaminase]-Linker2-[nucleobase editing domain]-COOH;
[0808] NH2-[nucleobase editing domain]-[deaminase]-[nucleobase editing domain]-COOH;
[0809] NH2-[nucleobase editing domain]-Linker1-[deaminase]-Linker2-[nucleobase editing domain]-[inosine BER inhibitor]-COOH;
[0810] NH2-[nucleobase editing domain]-Linker1-[deaminase]-[nucleobase editing domain]-[inosine BER inhibitor]-COOH;
[0811] NH2-[nucleobase editing domain]-[deaminase]-Linker2-[nucleobase editing domain]-[inosine BER inhibitor]-COOH;
[0812] NH2-[nucleobase editing domain]-[deaminase]-[nucleobase editing domain]-[inosine BER inhibitor]-COOH;
[0813] NH2-[inosine BER inhibitor]-[nucleobase editing domain]-Linker1-[deaminase]-Linker2-[nucleobase editing domain]-COOH;
[0814] NH2-[inosine BER inhibitor]-[nucleobase editing domain]-Linker1-[deaminase]-[nucleobase editing domain]-COOH;
[0815] NH2-[inosine BER inhibitor]-[nucleobase editing domain]-[deaminase]-Linker2-[nucleobase editing domain]-COOH; or
[0816] NH2-[inosine BER inhibitor]NH2-[nucleobase editing domain]-[deaminase]-[nucleobase editing domain]-COOH.

[0817] In some embodiments, the base editing fusion proteins provided herein need to be positioned at a precise location, for example, where a target base is placed within a defined region (e.g., a “deamination window”). In some embodiments, a target can be within a 4-base region. In some embodiments, such a defined target region can be approximately 15 bases upstream of the PAM. See Komor, A. C., et al., “Programmable editing of a target base in genomic DNA without double-stranded DNA cleavage” Nature 533, 420-424 (2016); Gaudelli, N. M., et al., “Programmable base editing of A·T to G·C in genomic DNA without DNA cleavage” Nature 551, 464-471 (2017); and Komor, A. C., et al., “Improved base excision repair inhibition and bacteriophage Mu Gam protein yields C:G-to-T:A base editors with higher efficiency and product purity” Science Advances 3:eaao4774 (2017), the entire contents of which are hereby incorporated by reference.

[0818] A defined target region can be a deamination window. A deamination window can be the defined region in which a base editor acts upon and deaminates a target nucleotide. In some embodiments, the deamination window is within a 2, 3, 4, 5, 6, 7, 8, 9, or 10 base regions. In some embodiments, the deamination window is 5, 6, 7, 8, 9, 10, 11, 12, 13, 14, 15, 16, 17, 18, 19, 20, 21, 22, 23, 24, or 25 bases upstream of the PAM.

[0819] The base editors of the present disclosure can comprise any domain, feature or amino acid sequence which facilitates the editing of a target polynucleotide sequence. For example, in some embodiments, the base editor comprises a nuclear localization sequence (NLS). In some embodiments, an NLS of the base editor is localized between a deaminase domain and a napDNAbp domain. In some embodiments, an NLS of the base editor is localized C-terminal to a napDNAbp domain.

[0820] Non-limiting examples of protein domains which can be included in the fusion protein include a deaminase domain (e.g., adenosine deaminase or cytidine deaminase), a uracil glycosylase inhibitor (UGI) domain, epitope tags, reporter gene sequences, and/or protein domains having one or more of the activities described herein.

[0821] A domain may be detected or labeled with an epitope tag, a reporter protein, other binding domains. Non-limiting examples of epitope tags include histidine (His) tags, V5 tags, FLAG tags, influenza hemagglutinin (HA) tags, Myc tags, VSV-G tags, and thioredoxin (Trx) tags. Examples of reporter genes include, but are not limited to, glutathione-5-transferase (GST), horseradish peroxidase (HRP), chloramphenicol acetyltransferase (CAT) beta-galactosidase, beta-glucuronidase, luciferase, green fluorescent protein (GFP), HcRed, DsRed, cyan fluorescent protein (CFP), yellow fluorescent protein (YFP), and autofluorescent proteins including blue fluorescent protein (BFP). Additional protein sequences can include amino acid sequences that bind DNA molecules or bind other cellular molecules, including but not limited to maltose binding protein (MBP), S-tag, Lex A DNA binding domain (DBD) fusions, GAL4 DNA binding domain fusions, and herpes simplex virus (HSV) BP16 protein fusions.

### Methods of Using Fusion Proteins Comprising a Cytidine or Adenosine Deaminase and a Cas9 Domain

[0822] Some aspects of this disclosure provide methods of using the fusion proteins, or complexes provided herein. For example, some aspects of this disclosure provide methods comprising contacting a DNA molecule with any of the fusion proteins provided herein, and with at least one guide RNA described herein.

[0823] In some embodiments, a fusion protein of the invention is used for editing a target gene of interest. In particular, a cytidine deaminase or adenosine deaminase nucleobase editor described herein is capable of making multiple mutations within a target sequence. These mutations may affect the function of the target. For example, when a cytidine deaminase or adenosine deaminase nucleobase editor is used to target a regulatory region the function of the regulatory region is altered and the expression of the downstream protein is reduced or eliminated.

[0824] It will be understood that the numbering of the specific positions or residues in the respective sequences depends on the particular protein and numbering scheme used. Numbering might be different, e.g., in precursors of a mature protein and the mature protein itself, and differences in sequences from species to species may affect numbering. One of skill in the art will be able to identify the respective residue in any homologous protein and in the respective encoding nucleic acid by methods well known in the art, e.g., by sequence alignment and determination of homologous residues.

[0825] It will be apparent to those of skill in the art that in order to target any of the fusion proteins comprising a Cas9 domain and a cytidine or adenosine deaminase, as disclosed herein, to a target site, e.g., a site comprising a mutation to be edited, a guide RNA, e.g., an sgRNA, may be co-expressed. As explained in more detail elsewhere herein, a guide RNA typically comprises a tracrRNA framework allowing for Cas9 binding, and a guide sequence, which confers sequence specificity to the Cas9:nucleic acid editing enzyme/domain fusion protein. Alternatively, the guide RNA and tracrRNA may be provided separately, as two nucleic acid molecules. In some embodiments, the guide RNA comprises a structure, wherein the guide sequence comprises a sequence that is complementary to the target sequence. The guide sequence is typically 20 nucleotides long. The sequences of suitable guide RNAs for targeting Cas9:nucleic acid editing enzyme/domain fusion proteins to specific genomic target sites will be apparent to those of skill in the art based on the instant disclosure. Such suitable guide RNA sequences typically comprise guide sequences that are complementary to a nucleic sequence within 50 nucleotides upstream or downstream of the target nucleotide to be edited. Some exemplary guide RNA sequences suitable for targeting any of the provided fusion proteins to specific target sequences are provided herein.

### Base Editor Efficiency

[0826] In some embodiments, the purpose of the methods provided herein is to alter a gene and/or gene product via gene editing. The nucleobase editing proteins provided herein can be used for gene editing-based human therapeutics in vitro or in vivo. It will be understood by the skilled artisan that the nucleobase editing proteins provided herein, e.g., the fusion proteins comprising a polynucleotide programmable nucleotide binding domain (e.g., Cas9) and a nucleobase editing domain (e.g., an adenosine deaminase domain or a cytidine deaminase domain) can be used to edit a nucleotide from A to G or C to T.

[0827] Advantageously, base editing systems as provided herein provide genome editing without generating double-strand DNA breaks, without requiring a donor DNA template, and without inducing an excess of stochastic insertions and deletions as CRISPR may do. In some embodiments, the present disclosure provides base editors that efficiently generate an intended mutation, such as a STOP codon, in a nucleic acid (e.g., a nucleic acid within a genome of a subject) without generating a significant number of unintended mutations, such as unintended point mutations. In some embodiments, an intended mutation is a mutation that is generated by a specific base editor (e.g., adenosine base editor or cytidine base editor) bound to a guide polynucleotide (e.g., gRNA), specifically designed to generate the intended mutation. In some embodiments, the intended mutation is in a gene associated with a target antigen associated with a disease or disorder, e.g., a neurological or ophthalmological disease or disorder. In some embodiments, the intended mutation is an adenine (A) to guanine (G) point mutation (e.g., SNP) in a gene associated with a target antigen associated with a disease or disorder, e.g a neurological or ophthalmological disease or disorder. In some embodiments, the intended mutation is an adenine (A) to guanine (G) point mutation within the coding region or non-coding region of a gene (e.g., regulatory region or element). In some embodiments, the intended mutation is a cytosine (C) to thymine (T) point mutation (e.g., SNP) in a gene associated with a target antigen associated with a disease or disorder, e.g., a neurological or ophthalmological disease or disorder. In some embodiments, the intended mutation is a cytosine (C) to thymine (T) point mutation within the coding region or non-coding region of a gene (e.g., regulatory region or element). In some embodiments, the intended mutation is a point mutation that generates a STOP codon, for example, a premature STOP codon within the coding region of a gene. In some embodiments, the intended mutation is a mutation that eliminates a stop codon.

[0828] The base editors of the invention advantageously modify a specific nucleotide base encoding a protein without generating a significant proportion of indels. An “indel”, as used herein, refers to the insertion or deletion of a nucleotide base within a nucleic acid. Such insertions or deletions can lead to frame shift mutations within a coding region of a gene. In some embodiments, it is desirable to generate base editors that efficiently modify (e.g. mutate) a specific nucleotide within a nucleic acid, without generating a large number of insertions or deletions (i.e., indels) in the nucleic acid. In some embodiments, it is desirable to generate base editors that efficiently modify (e.g. mutate or methylate) a specific nucleotide within a nucleic acid, without generating a large number of insertions or deletions (i.e., indels) in the nucleic acid. In certain embodiments, any of the base editors provided herein can generate a greater proportion of intended modifications (e.g., methylations) versus indels. In certain embodiments, any of the base editors provided herein can generate a greater proportion of intended modifications (e.g., mutations) versus indels.

[0829] In some embodiments, the base editors provided herein are capable of generating a ratio of intended mutations to indels (i.e., intended point mutations:unintended point mutations) that is greater than 1:1. In some embodiments, the base editors provided herein are capable of generating a ratio of intended mutations to indels that is at least 1.5:1, at least 2:1, at least 2.5:1, at least 3:1, at least 3.5:1, at least 4:1, at least 4.5:1, at least 5:1, at least 5.5:1, at least 6:1, at least 6.5:1, at least 7:1, at least 7.5:1, at least 8:1, at least 10:1, at least 12:1, at least 15:1, at least 20:1, at least 25:1, at least 30:1, at least 40:1, at least 50:1, at least 100:1, at least 200:1, at least 300:1, at least 400:1, at least 500:1, at least 600:1, at least 700:1, at least 800:1, at least 900:1, or at least 1000:1, or more. The number of intended mutations and indels may be determined using any suitable method.

[0830] In some embodiments, the base editors provided herein can limit formation of indels in a region of a nucleic acid. In some embodiments, the region is at a nucleotide targeted by a base editor or a region within 2, 3, 4, 5, 6, 7, 8, 9, or 10 nucleotides of a nucleotide targeted by a base editor. In some embodiments, any of the base editors provided herein can limit the formation of indels at a region of a nucleic acid to less than 1%, less than 1.5%, less than 2%, less than 2.5%, less than 3%, less than 3.5%, less than 4%, less than 4.5%, less than 5%, less than 6%, less than 7%, less than 8%, less than 9%, less than 10%, less than 12%, less than 15%, or less than 20%. The number of indels formed at a nucleic acid region may depend on the amount of time a nucleic acid (e.g., a nucleic acid within the genome of a cell) is exposed to a base editor. In some embodiments, a number or proportion of indels is determined after at least 1 hour, at least 2 hours, at least 6 hours, at least 12 hours, at least 24 hours, at least 36 hours, at least 48 hours, at least 3 days, at least 4 days, at least 5 days, at least 7 days, at least 10 days, or at least 14 days of exposing a nucleic acid (e.g., a nucleic acid within the genome of a cell) to a base editor.

[0831] Some aspects of the disclosure are based on the recognition that any of the base editors provided herein are capable of efficiently generating an intended mutation in a nucleic acid (e.g. a nucleic acid within a genome of a subject) without generating a considerable number of unintended mutations (e.g., spurious off-target editing or bystander editing). In some embodiments, an intended mutation is a mutation that is generated by a specific base editor bound to a gRNA, specifically designed to generate the intended mutation. In some embodiments, the intended mutation is a mutation that generates a stop codon, for example, a premature stop codon within the coding region of a gene. In some embodiments, the intended mutation is a mutation that eliminates a stop codon. In some embodiments, the intended mutation is a mutation that alters the splicing of a gene. In some embodiments, the intended mutation is a mutation that alters the regulatory sequence of a gene (e.g., a gene promotor or gene repressor). In some embodiments, any of the base editors provided herein are capable of generating a ratio of intended mutations to unintended mutations (e.g., intended mutations:unintended mutations) that is greater than 1:1. In some embodiments, any of the base editors provided herein are capable of generating a ratio of intended mutations to unintended mutations that is at least 1.5:1, at least 2:1, at least 2.5:1, at least 3:1, at least 3.5:1, at least 4:1, at least 4.5:1, at least 5:1, at least 5.5:1, at least 6:1, at least 6.5:1, at least 7:1, at least 7.5:1, at least 8:1, at least 10:1, at least 12:1, at least 15:1, at least 20:1, at least 25:1, at least 30:1, at least 40:1, at least 50:1, at least 100:1, at least 150:1, at least 200:1, at least 250:1, at least 500:1, or at least 1000:1, or more. It should be appreciated that the characteristics of the base editors described herein may be applied to any of the fusion proteins, or methods of using the fusion proteins provided herein.

[0832] Base editing is often referred to as a “modification”, such as, a genetic modification, a gene modification and modification of the nucleic acid sequence and is clearly understandable based on the context that the modification is a base editing modification. A base editing modification is therefore a modification at the nucleotide base level, for example as a result of the deaminase activity discussed throughout the disclosure, which then results in a change in the gene sequence, and may affect the gene product. In essence therefore, the gene editing modification described herein may result in a modification of the gene, structurally and/or functionally, wherein the expression of the gene product may be modified, for example, the expression of the gene is knocked out; or conversely, enhanced, or, in some circumstances, the gene function or activity may be modified. Using the methods disclosed herein, a base editing efficiency may be determined as the knockdown efficiency of the gene in which the base editing is performed, wherein the base editing is intended to knockdown the expression of the gene. A knockdown level may be validated quantitatively by determining the expression level by any detection assay, such as assay for protein expression level, for example, by flow cytometry; assay for detecting RNA expression such as quantitative RT-PCR, northern blot analysis, or any other suitable assay such as pyrosequencing; and may be validated qualitatively by nucleotide sequencing reactions.

[0833] In some embodiments, the modification, e.g., single base edit results in at least 10% reduction of the gene targeted expression. In some embodiments, the base editing efficiency may result in at least 10% reduction of the gene targeted expression. In some embodiments, the base editing efficiency may result in at least 20% reduction of the gene targeted expression. In some embodiments, the base editing efficiency may result in at least 30% reduction of the gene targeted expression. In some embodiments, the base editing efficiency may result in at least 40% reduction of the gene targeted expression. In some embodiments, the base editing efficiency may result in at least 50% reduction of the gene targeted expression. In some embodiments, the base editing efficiency may result in at least 60% reduction of the targeted gene expression. In some embodiments, the base editing efficiency may result in at least 70% reduction of the targeted gene expression. In some embodiments, the base editing efficiency may result in at least 80% reduction of the targeted gene expression. In some embodiments, the base editing efficiency may result in at least 90% reduction of the targeted gene expression. In some embodiments, the base editing efficiency may result in at least 91% reduction of the targeted gene expression. In some embodiments, the base editing efficiency may result in at least 92% reduction of the targeted gene expression. In some embodiments, the base editing efficiency may result in at least 93% reduction of the targeted gene expression. In some embodiments, the base editing efficiency may result in at least 94% reduction of the targeted gene expression. In some embodiments, the base editing efficiency may result in at least 95% reduction of the targeted gene expression. In some embodiments, the base editing efficiency may result in at least 96% reduction of the targeted gene expression. In some embodiments, the base editing efficiency may result in at least 97% reduction of the targeted gene expression. In some embodiments, the base editing efficiency may result in at least 98% reduction of the targeted gene expression. In some embodiments, the base editing efficiency may result in at least 99% reduction of the targeted gene expression. In some embodiments, the base editing efficiency may result in knockout (100% knockdown of the gene expression) of the gene that is targeted.

[0834] In some embodiments, any of base editor systems provided herein result in less than 50%, less than 40%, less than 30%, less than 20%, less than 19%, less than 18%, less than 17%, less than 16%, less than 15%, less than 14%, less than 13%, less than 12%, less than 11%, less than 10%, less than 9%, less than 8%, less than 7%, less than 6%, less than 5%, less than 4%, less than 3%, less than 2%, less than 1%, less than 0.9%, less than 0.8%, less than 0.7%, less than 0.6%, less than 0.5%, less than 0.4%, less than 0.3%, less than 0.2%, less than 0.1%, less than 0.09%, less than 0.08%, less than 0.07%, less than 0.06%, less than 0.05%, less than 0.04%, less than 0.03%, less than 0.02%, or less than 0.01% indel formation in the target polynucleotide sequence.

[0835] In some embodiments, targeted modifications, e.g., single base editing, are used simultaneously to target at least 4, 5, 6, 7, 8, 9, 10, 11, 12 13, 14, 15, 16, 17, 18, 19, 20, 21, 22, 23, 24, 25, 26, 27, 28, 29, 30, 31, 32, 33, 34, 35, 36, 37, 38, 39, 40, 41, 42, 43, 44, 45, 46, 47, 48, 49 or 50 different endogenous sequences for base editing with different guide RNAs. In some embodiments, targeted modifications, e.g. single base editing, are used to sequentially target at least 4, 5, 6, 7, 8, 9, 10, 11, 12 13, 14, 15, 16, 17, 18, 19, 20, 21, 22, 23, 24, 25, 26, 27, 28, 29, 30, 31, 32, 33, 34, 35, 36, 37, 38, 39, 40, 41, 42, 43, 44, 45, 46, 47, 48, 49 50, or more different endogenous gene sequences for base editing with different guide RNAs.

[0836] Some aspects of the disclosure are based on the recognition that any of the base editors provided herein are capable of efficiently generating an intended mutation, such as a point mutation, in a nucleic acid (e.g., a nucleic acid within a genome of a subject) without generating a significant number of unintended mutations, such as unintended point mutations (i.e., mutation of bystanders). In some embodiments, any of the base editors provided herein are capable of generating at least 0.01% of intended mutations (i.e., at least 0.01% base editing efficiency). In some embodiments, any of the base editors provided herein are capable of generating at least 0.01%, 1%, 2%, 3%, 4%, 5%, 10%, 15%, 20%, 25%, 30%, 40%, 45%, 50%, 60%, 70%, 80%, 90%, 95%, or 99% of intended mutations.

[0837] In some embodiments, any of base editor systems comprising one of the ABE8 base editor variants described herein result in less than 50%, less than 40%, less than 30%, less than 20%, less than 19%, less than 18%, less than 17%, less than 16%, less than 15%, less than 14%, less than 13%, less than 12%, less than 11%, less than 10%, less than 9%, less than 8%, less than 7%, less than 6%, less than 5%, less than 4%, less than 3%, less than 2%, less than 1%, less than 0.9%, less than 0.8%, less than 0.7%, less than 0.6%, less than 0.5%, less than 0.4%, less than 0.3%, less than 0.2%, less than 0.1%, less than 0.09%, less than 0.08%, less than 0.07%, less than 0.06%, less than 0.05%, less than 0.04%, less than 0.03%, less than 0.02%, or less than 0.01% indel formation in the target polynucleotide sequence. In some embodiments, any of base editor systems comprising one of the ABE8 base editor variants described herein result in less than 0.8% indel formation in the target polynucleotide sequence. In some embodiments, any of base editor systems comprising one of the ABE8 base editor variants described herein result in at most 0.8% indel formation in the target polynucleotide sequence. In some embodiments, any of base editor systems comprising one of the ABE8 base editor variants described herein result in less than 0.3% indel formation in the target polynucleotide sequence. In some embodiments, any of base editor systems comprising one of the ABE8 base editor variants described results in lower indel formation in the target polynucleotide sequence compared to a base editor system comprising one of ABE7 base editors. In some embodiments, any of base editor systems comprising one of the ABE8 base editor variants described herein results in lower indel formation in the target polynucleotide sequence compared to a base editor system comprising an ABE7.10.

[0838] In some embodiments, any of base editor systems comprising one of the ABE8 base editor variants described herein has reduction in indel frequency compared to a base editor system comprising one of the ABE7 base editors. In some embodiments, any of base editor systems comprising one of the ABE8 base editor variants described herein has at least 0.01%, at least 1%, at least 2%, at least 3%, at least 4%, at least 5%, at least 10%, at least 15%, at least 20%, at least 25%, at least 30%, at least 35%, at least 40%, at least 45%, at least 50%, at least 55%, at least 60%, at least 65%, at least 70%, at least 75%, at least 80%, at least 85%, at least 90%, or at least 95% reduction in indel frequency compared to a base editor system comprising one of the ABE7 base editors. In some embodiments, a base editor system comprising one of the ABE8 base editor variants described herein has at least 0.01%, at least 1%, at least 2%, at least 3%, at least 4%, at least 5%, at least 10%, at least 15%, at least 20%, at least 25%, at least 30%, at least 35%, at least 40%, at least 45%, at least 50%, at least 55%, at least 60%, at least 65%, at least 70%, at least 75%, at least 80%, at least 85%, at least 90%, or at least 95% reduction in indel frequency compared to a base editor system comprising an ABE7.10.

[0839] The invention provides adenosine deaminase variants (e.g., ABE8 variants) that have increased efficiency and specificity. In particular, the adenosine deaminase variants described herein are more likely to edit a desired base within a polynucleotide, and are less likely to edit bases that are not intended to be altered (e.g., “bystanders”).

[0840] In some embodiments, any of the base editing system comprising one of the ABE8 base editor variants described herein has reduced bystander editing or mutations. In some embodiments, an unintended editing or mutation is a bystander mutation or bystander editing, for example, base editing of a target base (e.g., A or C) in an unintended or non-target position in a target window of a target nucleotide sequence. In some embodiments, any of the base editing system comprising one of the ABE8 base editor variants described herein has reduced bystander editing or mutations compared to a base editor system comprising an ABE7 base editor, e.g., ABE7.10. In some embodiments, any of the base editing system comprising one of the ABE8 base editor variants described herein has reduced bystander editing or mutations by at least 1%, at least 2%, at least 3%, at least 4%, at least 5%, at least 10%, at least 15%, at least 20%, at least 25%, at least 30%, at least 35%, at least 40%, at least 45%, at least 50%, at least 55%, at least 60%, at least 65%, at least 70%, at least 75%, at least 80%, at least 85%, at least 90%, at least 95%, or at least 99% compared to a base editor system comprising an ABE7 base editor, e.g., ABE7.10. In some embodiments, any of the base editing system comprising one of the ABE8 base editor variants described herein has reduced bystander editing or mutations by at least 1.1 fold, at least 1.2 fold, at least 1.3 fold, at least 1.4 fold, at least 1.5 fold, at least 1.6 fold, at least 1.7 fold, at least 1.8 fold, at least 1.9 fold, at least 2.0 fold, at least 2.1 fold, at least 2.2 fold, at least 2.3 fold, at least 2.4 fold, at least 2.5 fold, at least 2.6 fold, at least 2.7 fold, at least 2.8 fold, at least 2.9 fold, or at least 3.0 fold compared to a base editor system comprising an ABE7 base editor, e.g., ABE7.10.

[0841] In some embodiments, any of the base editing system comprising one of the ABE8 base editor variants described herein has reduced spurious editing. In some embodiments, an unintended editing or mutation is a spurious mutation or spurious editing, for example, non-specific editing or guide independent editing of a target base (e.g., A or C) in an unintended or non-target region of the genome. In some embodiments, any of the base editing system comprising one of the ABE8 base editor variants described herein has reduced spurious editing compared to a base editor system comprising an ABE7 base editor, e.g., ABE7.10. In some embodiments, any of the base editing system comprising one of the ABE8 base editor variants described herein has reduced spurious editing by at least 1%, at least 2%, at least 3%, at least 4%, at least 5%, at least 10%, at least 15%, at least 20%, at least 25%, at least 30%, at least 35%, at least 40%, at least 45%, at least 50%, at least 55%, at least 60%, at least 65%, at least 70%, at least 75%, at least 80%, at least 85%, at least 90%, at least 95%, or at least 99% compared to a base editor system comprising an ABE7 base editor, e.g., ABE7.10. In some embodiments, any of the base editing system comprising one of the ABE8 base editor variants described herein has reduced spurious editing by at least 1.1 fold, at least 1.2 fold, at least 1.3 fold, at least 1.4 fold, at least 1.5 fold, at least 1.6 fold, at least 1.7 fold, at least 1.8 fold, at least 1.9 fold, at least 2.0 fold, at least 2.1 fold, at least 2.2 fold, at least 2.3 fold, at least 2.4 fold, at least 2.5 fold, at least 2.6 fold, at least 2.7 fold, at least 2.8 fold, at least 2.9 fold, or at least 3.0 fold compared to a base editor system comprising an ABE7 base editor, e.g., ABE7.10.

[0842] In some embodiments, any of the ABE8 base editor variants described herein have at least 0.01%, at least 1%, at least 2%, at least 3%, at least 4%, at least 5%, at least 10%, at least 15%, at least 20%, at least 25%, at least 30%, at least 35%, at least 40%, at least 45%, at least 50%, at least 55%, at least 60%, at least 65%, at least 70%, at least 75%, at least 80%, at least 85%, at least 90%, at least 95%, or at least 99% base editing efficiency. In some embodiments, the base editing efficiency may be measured by calculating the percentage of edited nucleobases in a population of cells. In some embodiments, any of the ABE8 base editor variants described herein have base editing efficiency of at least 0.01%, at least 1%, at least 2%, at least 3%, at least 4%, at least 5%, at least 10%, at least 15%, at least 20%, at least 25%, at least 30%, at least 35%, at least 40%, at least 45%, at least 50%, at least 55%, at least 60%, at least 65%, at least 70%, at least 75%, at least 80%, at least 85%, at least 90%, at least 95%, or at least 99% as measured by edited nucleobases in a population of cells.

[0843] In some embodiments, any of the ABE8 base editor variants described herein has higher base editing efficiency compared to the ABE7 base editors. In some embodiments, any of the ABE8 base editor variants described herein have at least 1%, at least 2%, at least 3%, at least 4%, at least 5%, at least 10%, at least 15%, at least 20%, at least 25%, at least 30%, at least 35%, at least 40%, at least 45%, at least 50%, at least 55%, at least 60%, at least 65%, at least 70%, at least 75%, at least 80%, at least 85%, at least 90%, at least 95%, at least 99%, at least 100%, at least 105%, at least 110%, at least 115%, at least 120%, at least 125%, at least 130%, at least 135%, at least 140%, at least 145%, at least 150%, at least 155%, at least 160%, at least 165%, at least 170%, at least 175%, at least 180%, at least 185%, at least 190%, at least 195%, at least 200%, at least 210%, at least 220%, at least 230%, at least 240%, at least 250%, at least 260%, at least 270%, at least 280%, at least 290%, at least 300%, at least 310%, at least 320%, at least 330%, at least 340%, at least 350%, at least 360%, at least 370%, at least 380%, at least 390%, at least 400%, at least 450%, or at least 500% higher base editing efficiency compared to an ABE7 base editor, e.g., ABE7.10.

[0844] In some embodiments, any of the ABE8 base editor variants described herein has at least 1.1 fold, at least 1.2 fold, at least 1.3 fold, at least 1.4 fold, at least 1.5 fold, at least 1.6 fold, at least 1.7 fold, at least 1.8 fold, at least 1.9 fold, at least 2.0 fold, at least 2.1 fold, at least 2.2 fold, at least 2.3 fold, at least 2.4 fold, at least 2.5 fold, at least 2.6 fold, at least 2.7 fold, at least 2.8 fold, at least 2.9 fold, at least 3.0 fold, at least 3.1 fold, at least 3.2, at least 3.3 fold, at least 3.4 fold, at least 3.5 fold, at least 3.6 fold, at least 3.7 fold, at least 3.8 fold, at least 3.9 fold, at least 4.0 fold, at least 4.1 fold, at least 4.2 fold, at least 4.3 fold, at least 4.4 fold, at least 4.5 fold, at least 4.6 fold, at least 4.7 fold, at least 4.8 fold, at least 4.9 fold, or at least 5.0 fold higher base editing efficiency compared to an ABE7 base editor, e.g., ABE7.10.

[0845] In some embodiments, any of the ABE8 base editor variants described herein have at least 0.01%, at least 1%, at least 2%, at least 3%, at least 4%, at least 5%, at least 10%, at least 15%, at least 20%, at least 25%, at least 30%, at least 35%, at least 40%, at least 45%, at least 50%, at least 55%, at least 60%, at least 65%, at least 70%, at least 75%, at least 80%, at least 85%, at least 90%, at least 95%, or at least 99% on-target base editing efficiency. In some embodiments, any of the ABE8 base editor variants described herein have on-target base editing efficiency of at least 0.01%, at least 1%, at least 2%, at least 3%, at least 4%, at least 5%, at least 10%, at least 15%, at least 20%, at least 25%, at least 30%, at least 35%, at least 40%, at least 45%, at least 50%, at least 55%, at least 60%, at least 65%, at least 70%, at least 75%, at least 80%, at least 85%, at least 90%, at least 95%, or at least 99% as measured by edited target nucleobases in a population of cells.

[0846] In some embodiments, any of the ABE8 base editor variants described herein has higher on-target base editing efficiency compared to the ABE7 base editors. In some embodiments, any of the ABE8 base editor variants described herein have at least 1%, at least 2%, at least 3%, at least 4%, at least 5%, at least 10%, at least 15%, at least 20%, at least 25%, at least 30%, at least 35%, at least 40%, at least 45%, at least 50%, at least 55%, at least 60%, at least 65%, at least 70%, at least 75%, at least 80%, at least 85%, at least 90%, at least 95%, at least 99%, at least 100%, at least 105%, at least 110%, at least 115%, at least 120%, at least 125%, at least 130%, at least 135%, at least 140%, at least 145%, at least 150%, at least 155%, at least 160%, at least 165%, at least 170%, at least 175%, at least 180%, at least 185%, at least 190%, at least 195%, at least 200%, at least 210%, at least 220%, at least 230%, at least 240%, at least 250%, at least 260%, at least 270%, at least 280%, at least 290%, at least 300%, at least 310%, at least 320%, at least 330%, at least 340%, at least 350%, at least 360%, at least 370%, at least 380%, at least 390%, at least 400%, at least 450%, or at least 500% higher on-target base editing efficiency compared to an ABE7 base editor, e.g., ABE7.10.

[0847] In some embodiments, any of the ABE8 base editor variants described herein has at least 1.1 fold, at least 1.2 fold, at least 1.3 fold, at least 1.4 fold, at least 1.5 fold, at least 1.6 fold, at least 1.7 fold, at least 1.8 fold, at least 1.9 fold, at least 2.0 fold, at least 2.1 fold, at least 2.2 fold, at least 2.3 fold, at least 2.4 fold, at least 2.5 fold, at least 2.6 fold, at least 2.7 fold, at least 2.8 fold, at least 2.9 fold, at least 3.0 fold, at least 3.1 fold, at least 3.2 fold, at least 3.3 fold, at least 3.4 fold, at least 3.5 fold, at least 3.6 fold, at least 3.7 fold, at least 3.8 fold, at least 3.9 fold, at least 4.0 fold, at least 4.1 fold, at least 4.2 fold, at least 4.3 fold, at least 4.4 fold, at least 4.5 fold, at least 4.6 fold, at least 4.7 fold, at least 4.8 fold, at least 4.9 fold, or at least 5.0 fold higher on-target base editing efficiency compared to an ABE7 base editor, e.g., ABE7.10.

[0848] The ABE8 base editor variants described herein may be delivered to a host cell via a plasmid, a vector, a LNP complex, or an mRNA. In some embodiments, any of the ABE8 base editor variants described herein is delivered to a host cell as an mRNA. In some embodiments, an ABE8 base editor delivered via a nucleic acid based delivery system, e.g., an mRNA, has on-target editing efficiency of at least at least 1%, at least 2%, at least 3%, at least 4%, at least 5%, at least 10%, at least 15%, at least 20%, at least 25%, at least 30%, at least 35%, at least 40%, at least 45%, at least 50%, at least 55%, at least 60%, at least 65%, at least 70%, at least 75%, at least 80%, at least 85%, at least 90%, at least 95%, or at least 99% as measured by edited nucleobases. In some embodiments, an ABE8 base editor delivered by an mRNA system has higher base editing efficiency compared to an ABE8 base editor delivered by a plasmid or vector system. In some embodiments, any of the ABE8 base editor variants described herein has at least 1%, at least 2%, at least 3%, at least 4%, at least 5%, at least 10%, at least 15%, at least 20%, at least 25%, at least 30%, at least 35%, at least 40%, at least 45%, at least 50%, at least 55%, at least 60%, at least 65%, at least 70%, at least 75%, at least 80%, at least 85%, at least 90%, at least 95%, at least 99%, at least 100%, at least 105%, at least 110%, at least 115%, at least 120%, at least 125%, at least 130%, at least 135%, at least 140%, at least 145%, at least 150%, at least 155%, at least 160%, at least 165%, at least 170%, at least 175%, at least 180%, at least 185%, at least 190%, at least 195%, at least 200%, at least 210%, at least 220%, at least 230%, at least 240%, at least 250%, at least 260%, at least 270%, at least 280%, at least 290%, at least 300% higher, at least 310%, at least 320%, at least 330%, at least 340%, at least 350%, at least 360%, at least 370%, at least 380%, at least 390%, at least 400%, at least 450%, or at least 500% on-target editing efficiency when delivered by an mRNA system compared to when delivered by a plasmid or vector system. In some embodiments, any of the ABE8 base editor variants described herein has at least 1.1 fold, at least 1.2 fold, at least 1.3 fold, at least 1.4 fold, at least 1.5 fold, at least 1.6 fold, at least 1.7 fold, at least 1.8 fold, at least 1.9 fold, at least 2.0 fold, at least 2.1 fold, at least 2.2 fold, at least 2.3 fold, at least 2.4 fold, at least 2.5 fold, at least 2.6 fold, at least 2.7 fold, at least 2.8 fold, at least 2.9 fold, at least 3.0 fold, at least 3.1 fold, at least 3.2 fold, at least 3.3 fold, at least 3.4 fold, at least 3.5 fold, at least 3.6 fold, at least 3.7 fold, at least 3.8 fold, at least 3.9 fold, at least 4.0 fold, at least 4.1 fold, at least 4.2 fold, at least 4.3 fold, at least 4.4 fold, at least 4.5 fold, at least 4.6 fold, at least 4.7 fold, at least 4.8 fold, at least 4.9 fold, or at least 5.0 fold higher on-target editing efficiency when delivered by an mRNA system compared to when delivered by a plasmid or vector system.

[0849] In some embodiments, any of base editor systems comprising one of the ABE8 base editor variants described herein result in less than 50%, less than 40%, less than 30%, less than 20%, less than 19%, less than 18%, less than 17%, less than 16%, less than 15%, less than 14%, less than 13%, less than 12%, less than 11%, less than 10%, less than 9%, less than 8%, less than 7%, less than 6%, less than 5%, less than 4%, less than 3%, less than 2%, less than 1%, less than 0.9%, less than 0.8%, less than 0.7%, less than 0.6%, less than 0.5%, less than 0.4%, less than 0.3%, less than 0.2%, less than 0.1%, less than 0.09%, less than 0.08%, less than 0.07%, less than 0.06%, less than 0.05%, less than 0.04%, less than 0.03%, less than 0.02%, or less than 0.01% off-target editing in the target polynucleotide sequence.

[0850] In some embodiments, any of the ABE8 base editor variants described herein has lower guided off-target editing efficiency when delivered by an mRNA system compared to when delivered by a plasmid or vector system. In some embodiments, any of the ABE8 base editor variants described herein has at least 1%, at least 2%, at least 3%, at least 4%, at least 5%, at least 10%, at least 15%, at least 20%, at least 25%, at least 30%, at least 35%, at least 40%, at least 45%, at least 50%, at least 55%, at least 60%, at least 65%, at least 70%, at least 75%, at least 80%, at least 85%, at least 90%, at least 95%, or at least 99% lower guided off-target editing efficiency when delivered by an mRNA system compared to when delivered by a plasmid or vector system. In some embodiments, any of the ABE8 base editor variants described herein has at least 1.1 fold, at least 1.2 fold, at least 1.3 fold, at least 1.4 fold, at least 1.5 fold, at least 1.6 fold, at least 1.7 fold, at least 1.8 fold, at least 1.9 fold, at least 2.0 fold, at least 2.1 fold, at least 2.2 fold, at least 2.3 fold, at least 2.4 fold, at least 2.5 fold, at least 2.6 fold, at least 2.7 fold, at least 2.8 fold, at least 2.9 fold, or at least 3.0 fold lower guided off-target editing efficiency when delivered by an mRNA system compared to when delivered by a plasmid or vector system. In some embodiments, any of the ABE8 base editor variants described herein has at least about 2.2 fold decrease in guided off-target editing efficiency when delivered by an mRNA system compared to when delivered by a plasmid or vector system.

[0851] In some embodiments, any of the ABE8 base editor variants described herein has lower guide-independent off-target editing efficiency when delivered by an mRNA system compared to when delivered by a plasmid or vector system. In some embodiments, any of the ABE8 base editor variants described herein has at least 1%, at least 2%, at least 3%, at least 4%, at least 5%, at least 10%, at least 15%, at least 20%, at least 25%, at least 30%, at least 35%, at least 40%, at least 45%, at least 50%, at least 55%, at least 60%, at least 65%, at least 70%, at least 75%, at least 80%, at least 85%, at least 90%, at least 95%, or at least 99% lower guide-independent off-target editing efficiency when delivered by an mRNA system compared to when delivered by a plasmid or vector system. In some embodiments, any of the ABE8 base editor variants described herein has at least 1.1 fold, at least 1.2 fold, at least 1.3 fold, at least 1.4 fold, at least 1.5 fold, at least 1.6 fold, at least 1.7 fold, at least 1.8 fold, at least 1.9 fold, at least 2.0 fold, at least 2.1 fold, at least 2.2 fold, at least 2.3 fold, at least 2.4 fold, at least 2.5 fold, at least 2.6 fold, at least 2.7 fold, at least 2.8 fold, at least 2.9 fold, at least 3.0 fold, at least 5.0 fold, at least 10.0 fold, at least 20.0 fold, at least 50.0 fold, at least 70.0 fold, at least 100.0 fold, at least 120.0 fold, at least 130.0 fold, or at least 150.0 fold lower guide-independent off-target editing efficiency when delivered by an mRNA system compared to when delivered by a plasmid or vector system. In some embodiments, ABE8 base editor variants described herein has 134.0 fold decrease in guide-independent off-target editing efficiency (e.g., spurious RNA deamination) when delivered by an mRNA system compared to when delivered by a plasmid or vector system. In some embodiments, ABE8 base editor variants described herein does not increase guide-independent mutation rates across the genome.

[0852] In some embodiments, a single gene delivery event (e.g., by transduction, transfection, electroporation or any other method) can be used to target base editing of 5 sequences within a cell's genome. In some embodiments, a single gene delivery event can be used to target base editing of 6 sequences within a cell's genome. In some embodiments, a single gene delivery event can be used to target base editing of 7 sequences within a cell's genome. In some embodiments, a single electroporation event can be used to target base editing of 8 sequences within a cell's genome. In some embodiments, a single gene delivery event can be used to target base editing of 9 sequences within a cell's genome. In some embodiments, a single gene delivery event can be used to target base editing of 10 sequences within a cell's genome. In some embodiments, a single gene delivery event can be used to target base editing of 20 sequences within a cell's genome. In some embodiments, a single gene delivery event can be used to target base editing of 30 sequences within a cell's genome. In some embodiments, a single gene delivery event can be used to target base editing of 40 sequences within a cell's genome. In some embodiments, a single gene delivery event can be used to target base editing of 50 sequences within a cell's genome.

[0853] In some embodiments, the method described herein, for example, the base editing methods has minimum to no off-target effects.

[0854] In some embodiments, the base editing method described herein results in at least 50% of a cell population that have been successfully edited (i.e., cells that have been successfully engineered). In some embodiments, the base editing method described herein results in at least 55% of a cell population that have been successfully edited. In some embodiments, the base editing method described herein results in at least 60% of a cell population that have been successfully edited. In some embodiments, the base editing method described herein results in at least 65% of a cell population that have been successfully edited. In some embodiments, the base editing method described herein results in at least 70% of a cell population that have been successfully edited. In some embodiments, the base editing method described herein results in at least 75% of a cell population that have been successfully edited. In some embodiments, the base editing method described herein results in at least 80% of a cell population that have been successfully edited. In some embodiments, the base editing method described herein results in at least 85% of a cell population that have been successfully edited. In some embodiments, the base editing method described herein results in at least 90% of a cell population that have been successfully edited. In some embodiments, the base editing method described herein results in at least 95% of a cell population that have been successfully edited. In some embodiments, the base editing method described herein results in about 91%, 92%, 93%, 94%, 95%, 96%, 97%, 98%, 99% or 100% of a cell population that have been successfully edited.

[0855] In some embodiments, the live cell recovery following a base editing intervention is greater than at least 60%, 70%, 80%, 90% of the starting cell population at the time of the base editing event. In some embodiments, the live cell recovery as described above is about 70%. In some embodiments, the live cell recovery as described above is about 75%. In some embodiments, the live cell recovery as described above is about 80%. In some embodiments, the live cell recovery as described above is about 85%. In some embodiments, the live cell recovery as described above is about 90%, or about 91%, 92%, 93%, 94% 95%, 96%, 97%, 98%, or 99%, or 100% of the cells in the population at the time of the base editing event.

[0856] In some embodiments the engineered cell population can be further expanded in vitro by about 2 fold, about 3-fold, about 4-fold, about 5-fold, about 6-fold, about 7-fold, about 8-fold, about 9-fold, about 10-fold, about 15-fold, about 20-fold, about 25-fold, about 30-fold, about 35-fold, about 40-fold, about 45-fold, about 50-fold, or about 100-fold.

[0857] The number of intended mutations and indels can be determined using any suitable method, for example, as described in International PCT Application Nos. PCT/2017/045381 (WO2018/027078) and PCT/US2016/058344 (WO2017/070632); Komor, A. C., et al., “Programmable editing of a target base in genomic DNA without double-stranded DNA cleavage” Nature 533, 420-424 (2016); Gaudelli, N. M., et al., “Programmable base editing of A·T to G·C in genomic DNA without DNA cleavage” Nature 551, 464-471 (2017); and Komor, A. C., et al., “Improved base excision repair inhibition and bacteriophage Mu Gam protein yields C:G-to-T:A base editors with higher efficiency and product purity” Science Advances 3:eaao4774 (2017); the entire contents of which are hereby incorporated by reference.

[0858] In some embodiments, to calculate indel frequencies, sequencing reads are scanned for exact matches to two 10-bp sequences that flank both sides of a window in which indels can occur. If no exact matches are located, the read is excluded from analysis. If the length of this indel window exactly matches the reference sequence the read is classified as not containing an indel. If the indel window is two or more bases longer or shorter than the reference sequence, then the sequencing read is classified as an insertion or deletion, respectively. In some embodiments, the base editors provided herein can limit formation of indels in a region of a nucleic acid. In some embodiments, the region is at a nucleotide targeted by a base editor or a region within 2, 3, 4, 5, 6, 7, 8, 9, or 10 nucleotides of a nucleotide targeted by a base editor.

[0859] The number of indels formed at a target nucleotide region can depend on the amount of time a nucleic acid (e.g., a nucleic acid within the genome of a cell) is exposed to a base editor. In some embodiments, the number or proportion of indels is determined after at least 1 hour, at least 2 hours, at least 6 hours, at least 12 hours, at least 24 hours, at least 36 hours, at least 48 hours, at least 3 days, at least 4 days, at least 5 days, at least 7 days, at least 10 days, or at least 14 days of exposing the target nucleotide sequence (e.g., a nucleic acid within the genome of a cell) to a base editor. It should be appreciated that the characteristics of the base editors as described herein can be applied to any of the fusion proteins, or methods of using the fusion proteins provided herein.

[0860] Details of base editor efficiency are described in International PCT Application Nos. PCT/2017/045381 (WO 2018/027078) and PCT/US2016/058344 (WO 2017/070632), each of which is incorporated herein by reference for its entirety. Also see Komor, A. C., et al., “Programmable editing of a target base in genomic DNA without double-stranded DNA cleavage” Nature 533, 420-424 (2016); Gaudelli, N. M., et al., “Programmable base editing of A·T to G·C in genomic DNA without DNA cleavage” Nature 551, 464-471 (2017); and Komor, A. C., et al., “Improved base excision repair inhibition and bacteriophage Mu Gam protein yields C:G-to-T:A base editors with higher efficiency and product purity” Science Advances 3:eaao4774 (2017), the entire contents of which are hereby incorporated by reference. In some embodiments, editing of a plurality of nucleobase pairs in one or more genes using the methods provided herein results in formation of at least one intended mutation. In some embodiments, said formation of said at least one intended mutation results in the disruption the normal function of a gene. In some embodiments, said formation of said at least one intended mutation results decreases or eliminates the expression of a protein encoded by a gene. It should be appreciated that multiplex editing can be accomplished using any method or combination of methods provided herein.

### Engineered Nucleases

[0861] In some embodiments, the gene editing system comprises an engineered nuclease (e.g., meganuclease, zinc finger nuclease (ZFN), Transcription activator-like effector nuclease (TALEN), or a Cas nuclease. In some embodiments, the gene editing system comprises a ZFN. ZFNs are fusion proteins comprising a zinc-finger DNA binding domain (“ZF”) and a nuclease domain. Each naturally-occurring ZF may bind to three consecutive base pairs (a DNA triplet), and ZF repeats are combined to recognize a DNA target sequence and provide sufficient affinity. Thus, engineered ZF repeats are combined to recognize longer DNA sequences, such as, e.g., 9 base pairs, 12 base pairs, 15 base pairs, 18 base pairs, etc. In some embodiments, the ZFN comprise ZFs fused to a nuclease domain from a restriction endonuclease (e.g., FokI). In some embodiments, the nuclease domain comprises a dimerization domain, such as when the nuclease dimerizes to be active, and a pair of ZFNs comprising the ZF repeats and the nuclease domain is designed for targeting a target sequence, which comprises two half target sequences recognized by each ZF repeats on opposite strands of the DNA molecule, with an interconnecting sequence in between (which is sometimes called a spacer in the literature). For example, the interconnecting sequence is 5 to 7 basepairs in length. When both ZFNs of the pair bind, the nuclease domain may dimerize and introduce a DSB within the interconnecting sequence. In some embodiments, the dimerization domain of the nuclease domain comprises a knob-into-hole motif to promote dimerization.

[0862] In some embodiments, the gene editing system comprises a TALEN. The DNA binding domain of TALENs usually comprises a variable number of 34 or 35 amino acid repeats (“modules” or “TAL modules”), with each module binding to a single DNA base pair, A, T, G, or C. Adjacent residues at positions 12 and 13 (the “repeat-variable di-residue” or RVD) of each module specify the single DNA base pair that the module binds to. In some embodiments, the TALEN may comprise a nuclease domain from a restriction endonuclease (e.g., FokI). In some embodiments, the nuclease domain may dimerize to be active, and a pair of TALENS is designed for targeting a target sequence, which comprises two half target sequences recognized by each DNA binding domain on opposite strands of the DNA molecule, with an interconnecting sequence in between. For example, each half target sequence is in the range of 10 to 20 base pairs, and the interconnecting sequence is 12 to 19 base pairs in length. When both TALENs of the pair bind, the nuclease domain may dimerize and introduce a double strand break within the interconnecting sequence. In some embodiments, the dimerization domain of the nuclease domain may comprise a knob-into-hole motif to promote dimerization.

[0863] In some embodiments, the gene editing system comprises a meganuclease. Naturally-occurring meganucleases recognize and cleave double-stranded DNA sequences of about 12 to 40 base pairs and are commonly grouped into five families. In some embodiments, the meganuclease is chosen from the LAGLIDADG family, the GIY-YIG family, the HNH family, the His-Cys box family, and the PD-(D/E)XK family. In some embodiments, the DNA binding domain of the meganuclease is engineered to recognize and bind to a sequence other than its cognate target sequence. In some embodiments, the DNA binding domain of the meganuclease is fused to a heterologous nuclease domain. In some embodiments, the meganuclease, such as a homing endonuclease, are fused to TAL modules to create a hybrid protein, such as a “megaTAL” protein. The megaTAL proteins can have improved DNA targeting specificity by recognizing the target sequences of both the DNA binding domain of the meganuclease and the TAL modules.

### G. Pharmaceutical Compositions and Formulations

[0864] Provided herein are compositions (e.g., pharmaceutical compositions) comprising any of the recombinant rabies virus genomes and recombinant rabies viruses described herein. The term “pharmaceutical composition,” as used herein, refers to a composition formulated for pharmaceutical use. In certain embodiments, the pharmaceutical composition further comprises a pharmaceutically acceptable carrier. In certain embodiments, the pharmaceutical composition comprises additional agents (e.g., for specific delivery, increasing half-life, or other therapeutic compounds).

[0865] As used herein, the term “pharmaceutically-acceptable carrier” refers to a pharmaceutically-acceptable material, composition, or vehicle, such as a liquid or solid filler, diluent, excipient, manufacturing aid (e.g., lubricant, talc magnesium, calcium or zinc stearate, or steric acid), or solvent encapsulating material, involved in carrying or transporting the compound (e.g., a recombinant rabies virus genome or recombinant rabies virus described herein) from one site (e.g., the delivery site) of the body, to another site (e.g., a target organ, tissue, or portion of the body). A pharmaceutically acceptable carrier is “acceptable” in the sense of being compatible with the other ingredients of the formulation and not injurious to the tissue of the subject (e.g., physiologically compatible, sterile, physiologic pH, etc.).

[0866] Some nonlimiting examples of materials which can serve as pharmaceutically-acceptable carriers include: (1) sugars, such as lactose, glucose and sucrose; (2) starches, such as com starch and potato starch; (3) cellulose, and its derivatives, such as sodium carboxymethyl cellulose, methylcellulose, ethyl cellulose, microcrystalline cellulose and cellulose acetate; (4) powdered tragacanth; (5) malt; (6) gelatin; (7) lubricating agents, such as magnesium stearate, sodium lauryl sulfate and talc; (8) excipients, such as cocoa butter and suppository waxes; (9) oils, such as peanut oil, cottonseed oil, safflower oil, sesame oil, olive oil, com oil and soybean oil; (10) glycols, such as propylene glycol; (11) polyols, such as glycerin, sorbitol, mannitol and polyethylene glycol (PEG); (12) esters, such as ethyl oleate and ethyl laurate; (13) agar; (14) buffering agents, such as magnesium hydroxide and aluminum hydroxide; (15) alginic acid; (16) pyrogen-free water; (17) isotonic saline; (18) Ringer's solution; (19) ethyl alcohol; (20) pH buffered solutions; (21) polyesters, polycarbonates and/or polyanhydrides; (22) bulking agents, such as polypeptides and amino acids (23) serum alcohols, such as ethanol; and (23) other non-toxic compatible substances employed in pharmaceutical formulations. Wetting agents, coloring agents, release agents, coating agents, sweetening agents, flavoring agents, perfuming agents, preservative and antioxidants can also be present in the formulation. The terms such as “excipient,” “carrier,” “pharmaceutically acceptable carrier,” “vehicle,” or the like are used interchangeably herein.

[0867] Pharmaceutical compositions can comprise one or more pH buffering compounds to maintain the pH of the formulation at a predetermined level that reflects physiological pH, such as in the range of about 5.0 to about 8.0. The pH buffering compound used in the aqueous liquid formulation can be an amino acid, such as histidine, or a mixture of amino acids, such as histidine and glycine. Alternatively, the pH buffering compound is preferably an agent which maintains the pH of the formulation at a predetermined level, such as in the range of about 5.0 to about 8.0, and which does not chelate calcium ions. Illustrative examples of such pH buffering compounds include, but are not limited to, imidazole and acetate ions. The pH buffering compound may be present in any amount suitable to maintain the pH of the formulation at a predetermined level.

[0868] Pharmaceutical compositions can also contain one or more osmotic modulating agents, i.e., a compound that modulates the osmotic properties (e.g., tonicity, osmolality, and/or osmotic pressure) of the formulation to a level that is acceptable to the blood stream and blood cells of recipient individuals. The osmotic modulating agent can be an agent that does not chelate calcium ions. The osmotic modulating agent can be any compound known or available to those skilled in the art that modulates the osmotic properties of the formulation. One skilled in the art may empirically determine the suitability of a given osmotic modulating agent for use in the inventive formulation. Illustrative examples of suitable types of osmotic modulating agents include, but are not limited to: salts, such as sodium chloride and sodium acetate; sugars, such as sucrose, dextrose, and mannitol; amino acids, such as glycine; and mixtures of one or more of these agents and/or types of agents. The osmotic modulating agent(s) may be present in any concentration sufficient to modulate the osmotic properties of the formulation.

[0869] In certain embodiments, the pharmaceutical composition is formulated for delivery to a subject, e.g., for gene therapy. Suitable routes of administrating the pharmaceutical composition described herein include, without limitation: topical, subcutaneous, transdermal, intradermal, intralesional, intraarticular, intraperitoneal, intravesical, transmucosal, gingival, intradental, intracochlear, transtympanic, intraorgan, epidural, intrathecal, intramuscular, intravenous, intravascular, intraosseous, periocular, intratumoral, intracerebral, and intracerebroventricular administration.

[0870] In certain embodiments, the pharmaceutical composition described herein is administered locally to a diseased site (e.g., tumor site). In certain embodiments, the pharmaceutical composition described herein is administered to a subject by injection, by means of a catheter, by means of a suppository, or by means of an implant, the implant being of a porous, non-porous, or gelatinous material, including a membrane, such as a silastic membrane, or a fiber.

[0871] In certain embodiments, the pharmaceutical composition described herein is delivered in a controlled release system. In certain embodiments, a pump can be used (see, e.g., Langer, 1990, Science 249: 1527-1533; Sefton, 1989, CRC Crit. Ref. Biomed. Eng. 14:201; Buchwald et al, 1980, Surgery 88:507; Saudek et al., 1989, N. Engl. J. Med. 321:574). In certain embodiments, polymeric materials can be used. See, e.g., Medical Applications of Controlled Release (Langer and Wise eds., CRC Press, Boca Raton, Fla., 1974); Controlled Drug Bioavailability, Drug Product Design and Performance (Smolen and Ball eds., Wiley, New York, 1984); Ranger and Peppas, 1983, Macromol. Sci. Rev. Macromol. Chem. 23:61. See, also, Levy et al, 1985, Science 228: 190; During et al, 1989, Ann. Neurol. 25:351; Howard et ah, 1989, J. Neurosurg. 71: 105. Other controlled release systems are discussed, for example, in Langer, supra.

[0872] In certain embodiments, the pharmaceutical composition is formulated in accordance with routine procedures as a composition adapted for intravenous or subcutaneous administration to a subject, e.g., a human. In certain embodiments, pharmaceutical compositions for administration by injection are solutions in sterile isotonic used as solubilizing agent and a local anesthetic such as lignocaine to ease pain at the site of the injection.

[0873] Generally, the ingredients are supplied either separately or mixed together in unit dosage form, for example, as a dry lyophilized powder or water free concentrate in a hermetically sealed container such as an ampoule or sachette indicating the quantity of active agent.

[0874] Where the pharmaceutical is to be administered by infusion, it can be dispensed with an infusion bottle containing sterile pharmaceutical grade water or saline. Where the pharmaceutical composition is administered by injection, an ampoule of sterile water for injection or saline can be provided so that the ingredients can be mixed prior to administration.

[0875] A pharmaceutical composition for systemic administration can be a liquid, e.g., sterile saline, lactated Ringer's or Hank's solution. In addition, the pharmaceutical composition can be in solid forms and re-dissolved or suspended immediately prior to use. Lyophilized forms are also contemplated. The pharmaceutical composition can be contained within a lipid particle or vesicle, such as a liposome or microcrystal, which is also suitable for parenteral administration. The particles can be of any suitable structure, such as unilamellar or plurilamellar, so long as compositions are contained therein. Compounds can be entrapped in “stabilized plasmid-lipid particles” (SPLP) containing the fusogenic lipid dioleoylphosphatidylethanolamine (DOPE), low levels (5-10 mol %) of cationic lipid, and stabilized by a polyethyleneglycol (PEG) coating (see, e.g., Zhang Y. P. et al., Gene Ther. 1999, 6: 1438-47). Positively charged lipids such as 1,2-dioleoyl-3-trimethylammonium-propane, or “DOTAP,” are particularly preferred for such particles and vesicles. The preparation of such lipid particles is well known. See, e.g., U.S. Pat. Nos. 4,880,635; 4,906,477; 4,911,928; 4,917,951; 4,920,016; and 4,921,757; each of which is incorporated herein by reference.

[0876] The pharmaceutical composition described herein can be administered or packaged as a unit dose. The term “unit dose” when used in reference to a pharmaceutical composition of the present disclosure refers to physically discrete units suitable as unitary dosage for the subject, each unit containing a predetermined quantity of active material calculated to produce the desired therapeutic effect in association with the required diluent; i.e., carrier, or vehicle.

[0877] Further, the pharmaceutical composition can be provided as a pharmaceutical kit comprising (a) a container containing a compound of the invention in lyophilized form and (b) a second container containing a pharmaceutically acceptable diluent (e.g., sterile, used for reconstitution or dilution of the lyophilized compound of the invention). Optionally associated with such containers) can be a notice in the form prescribed by a governmental agency regulating the manufacture, use or sale of pharmaceuticals or biological products, which notice reflects approval by the agency of manufacture, use or sale for human administration.

[0878] In another aspect, an article of manufacture containing materials useful for the treatment of the diseases described above is included. In certain embodiments, the article of manufacture comprises a container and a label. Suitable containers include, for example, bottles, vials, syringes, and test tubes. The containers can be formed from a variety of materials such as glass or plastic. In certain embodiments, the container holds a composition (e.g., a recombinant rabies virus genome or a recombinant rabies virus described herein) that is effective for treating a disease and can have a sterile access port. For example, the container can be an intravenous solution bag or a vial having a stopper pierceable by a hypodermic injection needle. The active agent in the composition is a compound (e.g., a recombinant rabies virus genome or a recombinant rabies virus) of the disclosure. In certain embodiments, the label on or associated with the container indicates that the composition is used for treating the disease of choice. The article of manufacture can further comprise a second container comprising a pharmaceutically-acceptable buffer, such as phosphate-buffered saline, Ringer's solution, or dextrose solution. It can further include other materials desirable from a commercial and user standpoint, including other buffers, diluents, filters, needles, syringes, and package inserts with instructions for use.

[0879] In some embodiments, any of the recombinant rabies virus genomes or recombinant rabies viruses described herein are provided as part of a pharmaceutical composition. In some embodiments, the pharmaceutical composition comprises any of the recombinant rabies virus genomes or recombinant rabies viruses described herein. In some embodiments, the pharmaceutical composition comprises any of the complexes provided herein.

[0880] In some embodiments, compositions provided herein are administered to a subject, for example, to a human subject, in order to effect a targeted genomic modification within the subject. In some embodiments, cells are obtained from the subject and contacted with any of the pharmaceutical compositions provided herein. In some embodiments, cells removed from a subject and contacted ex vivo with a pharmaceutical composition are re-introduced into the subject, optionally after the desired genomic modification has been effected or detected in the cells. Methods of delivering pharmaceutical compositions comprising nucleases are known, and are described, for example, in U.S. Pat. Nos. 6,453,242; 6,503,717; 6,534,261; 6,599,692; 6,607,882; 6,689,558; 6,824,978; 6,933,113; 6,979,539; 7,013,219; and 7,163,824, the disclosures of all of which are incorporated by reference herein in their entireties. Although the descriptions of pharmaceutical compositions provided herein are principally directed to pharmaceutical compositions which are suitable for administration to humans, it will be understood by the skilled artisan that such compositions are generally suitable for administration to animals or organisms of all sorts. Modification of pharmaceutical compositions suitable for administration to humans in order to render the compositions suitable for administration to various animals is well understood, and the ordinarily skilled veterinary pharmacologist can design and/or perform such modification with merely ordinary, if any, experimentation. Subjects to which administration of the pharmaceutical compositions is contemplated include, but are not limited to, humans and/or other primates; mammals, domesticated animals, pets, and commercially relevant mammals such as cattle, pigs, horses, sheep, cats, dogs, mice, and/or rats; and/or birds, including commercially relevant birds such as chickens, ducks, geese, and/or turkeys.

[0881] Formulations of the pharmaceutical compositions described herein may be prepared by any method known or hereafter developed in the art of pharmacology. In general, such preparatory methods include the step of bringing the active ingredient(s) into association with an excipient and/or one or more other accessory ingredients, and then, if necessary and/or desirable, shaping and/or packaging the product into a desired single- or multi-dose unit.

[0882] Pharmaceutical formulations may additionally comprise a pharmaceutically acceptable excipient, which, as used herein, includes any and all solvents, dispersion media, diluents, or other liquid vehicles, dispersion or suspension aids, surface active agents, isotonic agents, thickening or emulsifying agents, preservatives, solid binders, lubricants and the like, as suited to the particular dosage form desired. Remington's The Science and Practice of Pharmacy, 21st Edition, A. R. Gennaro (Lippincott, Williams & Wilkins, Baltimore, Md., 2006; incorporated in its entirety herein by reference) discloses various excipients used in formulating pharmaceutical compositions and known techniques for the preparation thereof. See also PCT application PCT/US2010/055131 (Publication number WO2011053982 A8, filed Nov. 2, 2010), incorporated in its entirety herein by reference, for additional suitable methods, reagents, excipients and solvents for producing pharmaceutical compositions comprising a nuclease. Except insofar as any conventional excipient medium is incompatible with a substance or its derivatives, such as by producing any undesirable biological effect or otherwise interacting in a deleterious manner with any other component(s) of the pharmaceutical composition, its use is contemplated to be within the scope of this disclosure. In certain embodiments, compositions in accordance with the present invention may be used for treatment of any of a variety of diseases, disorders, and/or conditions.

[0883] Various aspects of the present disclosure employs, unless otherwise indicated, conventional techniques of molecular biology (including recombinant techniques), microbiology, cell biology, biochemistry, and immunology, which are well within the purview of the skilled artisan. Such techniques are explained fully in the literature, such as, “Molecular Cloning: A Laboratory Manual”, second edition (Sambrook, 1989); “Oligonucleotide Synthesis” (Gait, 1984); “Animal Cell Culture” (Freshney, 1987); “Methods in Enzymology,” and “Handbook of Experimental Immunology” (Weir, 1996); “Gene Transfer Vectors for Mammalian Cells” (Miller and Calos, 1987); “Current Protocols in Molecular Biology” (Ausubel, 1987); “PCR: The Polymerase Chain Reaction”, (Mullis, 1994); “Current Protocols in Immunology” (Coligan, 1991). These techniques are applicable to the production of the various aspects of the present disclosure, and, as such, may be considered in making and practicing the same.

### H. Polynucleotides, Vectors, and Cells

[0884] Provided herein are polynucleotides comprising: (i) a recombinant rabies virus genome described herein; (ii) an N gene encoding for a rabies virus nucleoprotein or a functional variant thereof; (iii) a P gene encoding for a rabies virus phosphoprotein or a functional variant thereof; (iv) an L gene encoding for a rabies virus polymerase (e.g., a RNA-dependent RNA polymerase) or a functional variant thereof; (v) a G gene encoding for a rabies virus glycoprotein or a functional variant thereof; and/or (vi) an M gene encoding for a rabies virus matrix protein or a functional variant thereof.

[0885] The polynucleotides described herein can be obtained by any method known in the art, such as by chemically synthesizing the DNA chain, by PCR, or by the Gibson Assembly method. The advantage of constructing a full-length DNA by chemical synthesis or a combination of PCR method or Gibson Assembly method is that the codons may be optimized to ensure that the fusion protein is expressed at a high level in a host cell. Optimized codons may be selected using the genetic code use frequency database (http://www.kazusa.or.jp/codon/index.html), which is disclosed in the home page of Kazusa DNA Research Institute. In certain embodiments, the polynucleotide is codon optimized. In certain embodiments, the polynucleotide can be optimized by RNA optimization. Additional optimization methods can be included to increase stability for recombinant expression, including, e.g., replacement of signal sequences with exogenous signal sequences, removal of instability elements, removal of inhibitory regions, removal of potential splice sites, and other optimization methods known to those of ordinary skill in the art. See, e.g., U.S. Pat. No. 6,794,498, the disclosure of which is herein incorporated by reference in its entirety.

[0886] Once obtained, polynucleotides of the present disclosure may be incorporated into suitable expression vectors. Accordingly, the present disclosure also provides a vector comprising any of the polynucleotides disclosed herein, separately, or in combination. Suitable vectors include plasmids, viruses, artificial chromosomes, bacmids, cosmids, and others known to those of ordinary skill in the art. In certain embodiments, the vector is an expression vector.

[0887] Suitable expression vectors include Escherichia coli-derived plasmids (e.g., pBR322, pBR325, pUC12, pUC13); Bacillus subtilis-derived plasmids (e.g., pUB110, pTP5, pCI94); yeast-derived plasmids (e.g., pSH19, pSH15); plasmids suitable for expression in insect cells (e.g., pFast-Bac); plasmids suitable for expression in mammalian cells (e.g., pXTI, pRc/CMV, pRc/RSV, pcDNA1/Neo); also bacteriophages, such as lamda phage and the like; other vectors that may be used include insect viral vectors, such as baculovirus and the like (e.g., BmNPV, AcNPV); and viral vectors suitable for expression in a mammalian cell, such as retrovirus, vaccinia virus, adenovirus and the like.

[0888] The genes and/or transgenes comprises with the polynucleotides and vectors are typically expressed under the control of a transcriptional regulatory element. In certain embodiments, the transcriptional regulatory element can comprise one or more enhancer elements, intron elements, and/or promoter elements. In certain embodiments, the transcriptional regulatory element comprises a constitutive promoter. Examples of transcriptional regulatory elements include those that comprise a CMV promoter (promoter from human cytomegalovirus) optionally including a CMV enhancer, a EF1α promoter (promoter from human elongation factor 1 alpha), a CBA promoter (comprising a CMV early enhancer and a chicken β-actin promoter), a CAG promoter (comprising a CBA promoter and a rabbit β-globin intron), a CAGGS promoter (comprising a CMV enhancer, a CBA promoter, and chicken β-actin intron 1/exon 1), a PGK promoter (promoter from phosphoglycerate kinase), a U6 promoter (U6 nuclear promoter), a Ubc promoter (promoter from human ubiquitin C), a CASI promoter (comprising a CMV enhancer, a ubiquitin C enhancer, and a chicken β-actin promoter), and a CALM1 promoter (promoter from calmodulin 1). Various constitutive transcriptional regulatory elements are known to those of ordinary skill in the art.

[0889] In certain embodiments, the transcriptional regulatory element comprises an inducible promoter. For example, the transcriptional regulatory element can comprise the inducible TRE promoter (tetracyclin response element promoter). Such inducible promoters can be positive inducible, where the promoter is inactive because an activator protein cannot bind thereto, or negative inducible, wherein a repressor protein is bound thereto that prevents transcription. Examples of inducible promoters include those that are chemically inducible, e.g., a tetracycline ON (Tet-On) promoter system, a lac repressor system, a pBad prokaryotic promoter, and others such as alcohol or steroid regulated promoters. Inducible promoters can be temperature inducible, e.g., heat or cold induced promoters (e.g., Hsp70 or Hsp90-derived promoters), and light inducible, where light can be used to regulate transcription. In certain embodiments, the transcriptional regulatory element comprises a repressible promoter. Various inducible transcriptional regulatory elements are known to those of ordinary skill in the art.

[0890] In certain embodiments, the transcriptional regulatory element comprises an promoter exogenous to the gene or transgene. In certain embodiments, the transcriptional regulatory element comprises a synthetic promoter.

[0891] Suitable promoters may be chosen based on its use for expression in a desired host cell. For example, when the host is an animal cell, any one of the following promoters are used: SR-alpha promoter, SV40 promoter, LTR promoter, CMV (cytomegalovirus) promoter, RSV (Rous sarcoma virus) promoter, MoMuLV (Moloney mouse leukemia virus) LTR, HSV-TK (simple herpes virus thymidine kinase) promoter and the like are used. In certain embodiments, the promoter is CMV promoter or SR alpha promoter. In certain embodiments, the promoter is an elongation factor 1-alpha (EF1α) promoter. When the host cell is Escherichia coli, any of the following promoters may be used: trp promoter, lac promoter, recA promoter, lambdaPL promoter, Ipp promoter, T7 promoter and the like. When the host is genus Bacillus, any of the following promoters may be used: SPO1 promoter, SPO2 promoter, penP promoter and the like. When the host is a yeast, any of the following promoters may be used: Gal1/10 promoter, PHO5 promoter, PGK promoter, GAP promoter, ADH promoter and the like. When the host is an insect cell, any of the following promoters may be used: polyhedrin promoter, P10 promoter and the like. When the host is a plant cell, any of the following promoters may be used: CaMV35S promoter, CaMV19S promoter, NOS promoter and the like.

[0892] If desired, the expression vector also includes any one or more of an enhancer, splicing signal, terminator, polyadenylation signal, a selection marker (e.g., a drug resistance gene, auxotrophic complementary gene and the like), or a replication origin.

[0893] The polynucleotides of the present disclosure may be introduced into virtually any host cell of interest, including but not limited to bacteria, yeast, fungi, insects, plants, and animal cells using routine methods known to the skilled artisan.

[0894] The genus Escherichia includes Escherichia coli K12/DH1, Escherichia coli JM103, Escherichia coli JA221, Escherichia coli HB101, Escherichia coli C600 and the like. The genus Bacillus includes Bacillus subtilis MI 114, Bacillus subtilis 207-21, and the like.

[0895] Yeast useful for hosting the polynucleotides of the disclosure include Saccharomyces cerevisiae AH22, AH22 R⁻, NA87-11A, DKD-5D, 20B-12, Schizosaccharomyces pombe NCYC1913, NCYC2036, Pichia pastoris KM71, and the like.

[0896] Polynucleotides of the present disclosure may be introduced into insect cells using, for example, viral vectors, such as AcNPV. Insect host cells include any of the following cell lines: cabbage armyworm larva-derived established line (Spodoptera frugiperda cell; Sf cell), MG1 cells derived from the mid-intestine of Trichoplusiani, High Five, cells derived from an egg of Trichoplusiani, Mamestra brassicae-derived cells, Estigmena acraz-derived cells, and the like. When the virus is BmNPV, cells of a Bombyx mori-derived line (Bombyx mori N cell; BmN cell) and the like are used. Sf cells include, for example, Sf9 cells (ATCC CRL1711), Sf21s cells, and the like.

[0897] Mammalian cell lines may be used, including, without limitation monkey COS-7 cells, monkey Vero cells, Chinese hamster ovary (CHO) cells, dhfr gene-deficient CHO cells, mouse L cells, mouse AtT-20 cells, mouse myeloma cells, rat GH3 cells, human FL cells, human embryonic kidney (HEK) cells (e.g., HEK293, HEK293T), COS cells (e.g., COS1 or COS), BHK cells, MDCK cells, NS0 cells, PER.C6 cells, CRL7O3O cells, HsS78Bst cells, HeLa cells, NIH 3T3 cells, HepG2 cells, SP210 cells, R1.1 cells, B-W cells, L-M cells, BSC1 cells, BSC40 cells, YB/20 cells and BMT10 cells, and the like.

[0898] In certain embodiments, suitable cells are of a mammalian, a bacterial, or an insect origin. In certain embodiments, the cell is selected from the group consisting of a HEK293 cell, a HEK293T cells, a VERO cell, a BHK cell, and a BSR cell.

[0899] All the above-mentioned host cells may be haploid (monoploid), or polyploid (e.g., diploid, triploid, tetraploid and the like.

[0900] Various methods of introducing polynucleotides of the disclosure into a host cell described herein are known to those of ordinary skill in the art. For example, such methods may include the use of any transfection method known in the art (e.g., using lysozyme, PEG, CaCl2) coprecipitation, electroporation, microinjection, particle gun, lipofection, Agrobacterium and the like). The transfection method is selected based on the host cell to be transfected. Escherichia coli can be transformed according to the methods described in, for example, Proc. Natl. Acad. Sci. USA, 69, 2110 (1972), Gene, 17, 107 (1982) and the like. Methods for transducing the genus Bacillus are described in, for example, Molecular & General Genetics, 168, 111 (1979). Yeast cells are transduced using methods described in, for example, Methods in Enzymology, 194, 182-187 (1991), Proc. Natl. Acad. Sci. USA, 75, 1929 (1978) and the like. Insect cells are transfected using methods described in, for example, Bio/Technology, 6, 47-55 (1988) and the like. Mammalian cells are transfected using methods described in, for example, Cell Engineering additional volume 8, New Cell Engineering Experiment Protocol, 263-267 (1995) (published by Shujunsha), and Virology, 52, 456 (1973).

[0901] Cells comprising expression vectors of the present disclosure are cultured according to known methods, which vary depending on the host. For example, when Escherichia coli or genus Bacillus cells are cultured, a liquid medium is used. The medium preferably contains a carbon source, nitrogen source, inorganic substance and other components necessary for the growth of the transformant. Examples of the carbon source include glucose, dextrin, soluble starch, sucrose, and the like; examples of the nitrogen source include inorganic or organic substances such as ammonium salts, nitrate salts, corn steep liquor, peptone, casein, meat extract, soybean cake, potato extract, and the like; and examples of the inorganic substance include calcium chloride, sodium dihydrogen phosphate, magnesium chloride, and the like. The medium may also contain yeast extract, vitamins, growth promoting factors, and the like. The pH of the medium is preferably between about 5 to about 8. As a medium for culturing Escherichia coli, for example, M9 medium containing glucose and casamino acid (see, e.g., Journal of Experiments in Molecular Genetics, 431-433, Cold Spring Harbor Laboratory, New York 1972) is used. Escherichia coli is cultured at generally about 15 to about 43° C. Where necessary, aeration and stirring may be performed. The genus Bacillus is cultured at generally about 30 to about 40° C. Where necessary, aeration and stirring is performed.

[0902] Examples of medium suitable for culturing yeast include Burkholder minimum medium, SD medium containing 0.5% casamino acid, and the like. The pH of the medium is preferably about 5-about 8. The culture is performed at generally about 20° C. to about 35° C. Where necessary, aeration and stirring may be performed.

[0903] As a medium for culturing an insect cell or insect, Grace's Insect Medium containing an additive such as inactivated 10% bovine serum, and the like are used. The pH of the medium is preferably about 6.2 to about 6.4. Cells are cultured at about 27° C. Where necessary, aeration and stirring may be performed.

[0904] Mammalian cells are cultured, for example, in any one of minimum essential medium (MEM) containing about 5 to about 20% of fetal bovine serum, Dulbecco's modified Eagle medium (DMEM), RPMI 1640 medium, 199 medium, and the like. The pH of the medium is preferably about 6 to about 8. The culture is performed at about 30° C. to about 40° C. Where necessary, aeration and stirring may be performed.

### I. Packaging Systems and Methods Thereof

[0905] The present disclosure provides packaging systems useful for the recombinant preparation of a rabies virus particle described herein. In particular, the packaging systems provide necessary components required for the preparation of a rabies virus particle described herein. In certain embodiments, the packaging system is useful for the recombinant preparation of a rabies virus particle comprising a recombinant rabies virus genome, wherein the genome lacks a G gene encoding for a rabies virus glycoprotein or a functional variant thereof; and/or the genome lacks an L gene encoding for a rabies virus polymerase or a functional variant thereof. In certain embodiments, the packaging system is useful for the recombinant preparation of a rabies virus particle comprising a recombinant rabies virus genome, wherein the genome lacks a G gene encoding for a rabies virus glycoprotein or a functional variant thereof. In certain embodiments, the packaging system is useful for the recombinant preparation of a rabies virus particle comprising a recombinant rabies virus genome, wherein the genome lacks a G gene encoding for a rabies virus glycoprotein or a functional variant thereof; and the genome lacks an L gene encoding for a rabies virus polymerase or a functional variant thereof.

[0906] The packaging systems described herein generally comprise or consist of: (i) an N gene encoding for a rabies virus nucleoprotein or a functional variant thereof; (ii) a P gene encoding for a rabies virus phosphoprotein or a functional variant thereof; and (iii) an L gene encoding for a rabies virus polymerase or a functional variant thereof. In certain embodiments, the packaging system further comprises an M gene encoding for a rabies virus matrix protein or a functional variant thereof. In certain embodiments, the packaging system further comprises a G gene encoding for a rabies virus glycoprotein or a functional variant thereof.

[0907] The N, P, and L genes of the packaging system can be provided in one or more vectors (e.g., transfecting plasmids). For example, the packaging system can comprise a separate transfecting plasmid for each of the N, P, and L genes, e.g., a first transfecting plasmid comprising an N gene encoding for a rabies virus nucleoprotein or a functional variant thereof; a second transfecting plasmid comprising a P gene encoding for a rabies virus phosphoprotein or a functional variant thereof; and a third transfecting plasmid comprising an L gene encoding for a rabies virus polymerase or a functional variant thereof. In certain embodiments, a single transfecting plasmid comprises two or more of the N, P, and L genes. For example, the packaging system can comprise a transfecting plasmid comprising an N gene encoding for a rabies virus nucleoprotein or a functional variant thereof, and a P gene encoding for a rabies virus phosphoprotein or a functional variant thereof; the packaging system can comprise a transfecting plasmid comprising an N gene encoding for a rabies virus nucleoprotein or a functional variant thereof, and an L gene encoding for a rabies virus polymerase or a functional variant thereof; the packaging system can comprise a transfecting plasmid comprising a P gene encoding for a rabies virus phosphoprotein or a functional variant thereof, and an L gene encoding for a rabies virus polymerase or a functional variant thereof. In certain embodiments, the packaging system can comprise a transfecting plasmid comprising an N gene encoding for a rabies virus nucleoprotein or a functional variant thereof, a P gene encoding for a rabies virus phosphoprotein or a functional variant thereof, and an L gene encoding for a rabies virus polymerase or a functional variant thereof.

[0908] The M and G genes of the packaging system can be provided in one or more transfecting plasmids. In certain embodiments, the packaging system comprises a separate transfecting plasmid for the M and G genes. For example, in certain embodiments, the packaging system can further comprise a transfecting plasmid comprising an M gene encoding for a rabies virus matrix protein or a functional variant thereof. In certain embodiments, the packaging system can further comprise a transfecting plasmid comprising a G gene encoding for a rabies virus glycoprotein or a functional variant thereof. The M and/or G gene can also be combined into a transfecting plasmid that comprises a N, P, and/or L gene as described herein. For example, a single transfecting plasmid can comprise an N gene encoding for a rabies virus nucleoprotein or a functional variant thereof, a P gene encoding for a rabies virus phosphoprotein or a functional variant thereof, an L gene encoding for a rabies virus polymerase or a functional variant thereof, an M gene encoding for a rabies virus matrix protein or a functional variant thereof, and a G gene encoding for a rabies virus glycoprotein or a functional variant thereof. Various other combinations can readily be appreciated by those of ordinary skill in the art.

[0909] The N, P, L, M, and/or G genes can all be under control of one or more transcriptional regulatory elements. In certain embodiments, the transcriptional regulatory element comprises a promoter and/or enhancer sequence. In certain embodiments, the transcriptional regulatory element comprises an EF1α promoter. Various promoters and/or enhancer sequences are known in the art and are described herein as examples, and one of ordinary skill in the art would be able to select a suitable promoter and/or enhancer sequence for their needs.

[0910] Where two or more of the N, P, L, M, and/or G genes reside on the same vector, the two or more genes may be present in one or more expression cassettes. For example, each of the N, P, L, M, and/or G genes can be within their own expression cassette each comprising a transcriptional regulatory element and/or transcriptional termination element.

[0911] Where two or more genes reside in the same expression cassette, the genes may be separated by a linker sequence. In certain embodiments, the linker sequence is a ribosomal skipping element comprising a nucleic acid sequence that encodes for an internal ribosome entry site (IRES). As used herein, “an internal ribosome entry site” or “IRES” refers to an element that promotes direct internal ribosome entry to the initiation codon, such as ATG, of a protein coding region, thereby leading to cap-independent translation of the gene. Various internal ribosome entry sites are known to those of skill in the art, including, without limitation, IRES obtainable from viral or cellular mRNA sources, e.g., immunoglobulin heavy-chain binding protein (BiP); vascular endothelial growth factor (VEGF); fibroblast growth factor 2; insulin-like growth factor; translational initiation factor eIF4G; yeast transcription factors TFIID and HAP4; and IRES obtainable from, e.g., cardiovirus, rhinovirus, aphthovirus, HCV, Friend murine leukemia virus (FrMLV), and Moloney murine leukemia virus (MoMLV). In certain embodiments, the linker sequence is a ribosomal skipping element comprising a nucleic acid sequence that encodes for a self-cleaving peptide. As used herein, a “self-cleaving peptide” or “2A peptide” refers to an oligopeptide that allow multiple proteins to be encoded as polyproteins, which dissociate into component proteins upon translation. Use of the term “self-cleaving” is not intended to imply a proteolytic cleavage reaction. Various self-cleaving or 2A peptides are known to those of skill in the art, including, without limitation, those found in members of the Picornaviridae virus family, e.g., foot-and-mouth disease virus (FMDV), equine rhinitis A virus (ERAV0, Thosea asigna virus (TaV), and porcine tescho virus-1 (PTV-1); and carioviruses such as Theilovirus and encephalomyocarditis viruses. 2A peptides derived from FMDV, ERAV, PTV-1, and TaV are referred to herein as “F2A,” “E2A,” “P2A,” and “T2A,” respectively. Those of skill in the art would be able to select the appropriate linker sequence for their needs.

[0912] In certain embodiments, a single vector (e.g., transfecting plasmid) comprises a first expression cassette comprising the N and P genes, and a second expression cassette comprising the L gene. In certain embodiments, the first expression cassette comprises from 5′ to 3′: a transcriptional regulatory element; the P gene; and the N gene. In certain embodiments, the first expression cassette comprises from 5′ to 3′: a transcriptional regulatory element; the P gene; a ribosomal skipping element; and the N gene. In certain embodiments, the second expression cassette comprises from 5′ to 3′: a transcriptional regulatory element; and the L gene. In certain embodiments, the first expression cassette and the second expression cassette can be in the same orientation within the vector. In certain embodiments, the first expression cassette and the second expression cassette can be in the opposite orientation within the vector.

[0913] Accordingly, a packaging system of the present disclosure comprises: (i) a recombinant rabies virus genome vector (e.g., virus genome transfecting plasmid); and (ii) one or more transfecting plasmids comprising the N, P, L, M, and/or G genes. The one or more transfecting plasmids comprising the N, P, L, M, and/or G genes can be introduced into a host cell (e.g., a recombinant rabies virus particle packaging cell) using various methods known to those of ordinary skill in the art. For example, the one or more transfecting plasmids can be introduced into a suitable host cell by electroporation, nucleofection, or lipofection.

[0914] The present disclosure also provides a method for the recombinant preparation of a rabies virus particle, wherein the method comprises introducing a packaging system described herein into a cell under conditions operative for enveloping the recombinant rabies virus genome to form the recombinant rabies virus particle. In certain embodiments, host packaging cell can be transiently transfected with the one or more transfecting plasmids comprising the N, P, L, M, and/or G genes. In certain embodiments, the host packaging cell can be transfected with the one or more transfecting plasmids comprising the N, P, L, M, and/or G genes, wherein the host packaging cell is further made into a stable cell line. Various methods for producing stable cell lines are known to those of ordinary skill in the art. In general, the gene of interest (e.g., N, P, L, M and/or G genes) is introduced into a cell, and then into the nucleus of the cell, and finally integrated into the genome of the cell. Chromosomal integration events are rare and stably-integrated cell lines have to be selected and cultured. Various selection systems are known in the art, including resistance to antibiotics such as neomycin phosphotransferase, conferring resistance to G418, dihydrofolate reductase (DHFR), or glutamine synthetase. Other methods for producing stable cell lines include the use of the Sleeping Beauty (SB) system, as described in the Experimental Examples. Briefly, a transposon comprising the integrant of interest is designed with flanking inverted repeat/direct repeat sequences that result in precise integration into a TA dinucleotide. Methods for SB transposon based stable cell line generation is known in the art, see, e.g., Davidson et al., Cold Spring Harb Protoc. (2009) 4(8): 1018-1023. Stable cell lines can also be generated via the use of lentiviral vectors, see, e.g., Tandon et al., Bio Protoc. (2018) 8(21): e3073.

[0915] A recombinant rabies virus genome vector (e.g., virus genome transfecting plasmid) is then introduced into a host packaging cell that has the N, P, L, M, and/or G genes stably-integrated or transiently transfected therein.

[0916] As such, in certain embodiments, a method for the recombinant preparation of a rabies virus particle comprises introducing (i) a recombinant rabies virus genome vector (e.g., virus genome transfecting plasmid); and (ii) one or more transfecting plasmids comprising the N, P, L, M, and/or G genes into a host packaging cell. In certain embodiments, a method for the recombinant preparation of a rabies virus particle comprises introducing a recombinant rabies virus genome vector (e.g., virus genome transfecting plasmid) into a host packaging cell, wherein the host packaging cell comprises the N, P, L, M, and/or G genes stably integrated therein. Methods for the preparation of recombinant rabies virus particles are known in the art, see, e.g., Trabelsi et al., Vaccine (2019) 37(47): 7052-7060; Wickersham et al., Nature Protoc. (2010) 5(3): 595-606; Ghanem et al., Eur. J. Cell Biol. (2012) 91: 10-16; Osakada and Wickersham, Nature Protoc. (2013) 8(8): 1583-1601; and Sullivan and Wickersham, Cold Spring Harb Protoc. (2015) 4: 386-91, the disclosures of which are herein incorporated by reference in their entireties.

[0917] In certain embodiments, the recombinant rabies virus particle titer that is obtained using a method of production described herein is greater than about 1E8 transducing units (TU)/mL. For example, in certain embodiments, the recombinant rabies virus particle titer that is obtained is about 8E7 TU/mL, about 9E7 TU/mL, about 1E8 TU/mL, about 1.1E8 TU/mL, about 1.2E8 TU/mL, about 1.3E8 TU/mL, about 1.4E8 TU/mL, about 1.5E8 TU/mL, about 1.6E8 TU/mL, about 1.7E8 TU/mL, about 1.8E8 TU/mL, about 1.9E8 TU/mL, about 2E8 TU/mL, about 2.5E8 TU/mL, about 3E8 TU/mL, about 3.5E8 TU/mL, about 4E8 TU/mL, about 4.5E8 TU/mL, about 5E8 TU/mL, about 5.5E8 TU/mL, about 6E8 TU/mL, about 6.5E8 TU/mL, about 7E8 TU/mL, about 7.5E8 TU/mL, about 8E8 TU/mL, about 8.5E8 TU/mL, about 9E8 TU/mL, about 9.1E8 TU/mL, about 9.2E8 TU/mL, about 9.3E8 TU/mL, about 9.4E8 TU/mL, about 9.5E8 TU/mL, about 9.6E8 TU/mL, about 9.7E8 TU/mL, about 9.8E8 TU/mL, about 9.9E8 TU/mL, about 1E9 TU/mL, about 1.1E9 TU/mL, about 1.2E9 TU/mL, or any value in between the aforementioned titers. In certain embodiments, the recombinant rabies virus particle titer that is obtained is from about 1E8 TU/mL to about 1E9 TU/mL, e.g., from 8E7 TU/mL to 1.2E9 TU/mL, and any range therebetween.

### J. Methods of Gene Therapy

[0918] Provided herein are methods of gene therapy using the recombinant rabies virus particles described herein. In certain embodiments, a method for expressing a therapeutic transgene in a target cell, is provided. In certain embodiments, a method for expressing a base editor in a target cell, is provided.

[0919] In certain embodiments, a method for expressing a therapeutic transgene in a target cell comprises transducing a target cell with a recombinant rabies virus particle as described herein. For example, a method for expressing a therapeutic transgene in a target cell comprises transducing a target cell with a recombinant rabies virus particle comprising a rabies virus glycoprotein; and a recombinant rabies virus genome comprising a nucleic acid encoding a therapeutic transgene, wherein: the genome lacks a G gene encoding for a rabies virus glycoprotein or a functional variant thereof; and/or the genome lacks an L gene encoding for a rabies virus polymerase or a functional variant thereof. In certain embodiments, the method comprises transducing a target cell with a recombinant rabies virus particle comprising a rabies virus glycoprotein; and a recombinant rabies virus genome comprising a nucleic acid encoding a therapeutic transgene, wherein: the genome lacks a G gene encoding for a rabies virus glycoprotein or a functional variant thereof. In certain embodiments, the method comprises transducing a target cell with a recombinant rabies virus particle comprising a rabies virus glycoprotein; and a recombinant rabies virus genome comprising a nucleic acid encoding a therapeutic transgene, wherein: the genome lacks a G gene encoding for a rabies virus glycoprotein or a functional variant thereof; and the genome lacks an L gene encoding for a rabies virus polymerase or a functional variant thereof.

[0920] Various methods of transducing a target cell with a recombinant virus particle are known to those of ordinary skill in the art. For example, the target cell can be contacted with the recombinant virus particle, resulting in receptor-mediated attachment of the virus particle, followed by clathrin-dependent endocytosis of the virus particle into the cell.

[0921] In certain embodiments, methods are provided for expressing a nucleobase editor in a target cell. For example, such methods comprise transducing a target cell with a recombinant rabies virus particle, wherein the recombinant virus particle comprises: a rabies virus glycoprotein; and a recombinant rabies virus genome comprising a nucleic acid encoding a nucleobase editor comprising a polynucleotide programmable nucleotide binding domain and a nucleobase editing domain, wherein: the genome lacks a G gene encoding for a rabies virus glycoprotein or a functional variant thereof; and/or the genome lacks an L gene encoding for a rabies virus polymerase or a functional variant thereof. In certain embodiments, the method comprises transducing a target cell with a recombinant rabies virus particle, wherein the recombinant virus particle comprises: a rabies virus glycoprotein; and a recombinant rabies virus genome comprising a nucleic acid encoding a nucleobase editor comprising a polynucleotide programmable nucleotide binding domain and a nucleobase editing domain, wherein: the genome lacks a G gene encoding for a rabies virus glycoprotein or a functional variant thereof. In certain embodiments, the method comprises transducing a target cell with a recombinant rabies virus particle, wherein the recombinant virus particle comprises: a rabies virus glycoprotein; and a recombinant rabies virus genome comprising a nucleic acid encoding a nucleobase editor comprising a polynucleotide programmable nucleotide binding domain and a nucleobase editing domain, wherein: the genome lacks a G gene encoding for a rabies virus glycoprotein or a functional variant thereof; and the genome lacks an L gene encoding for a rabies virus polymerase or a functional variant thereof.

[0922] Where the methods are for expressing a nucleobase editor in a target cell, the polynucleotide programmable nucleotide binding domain, when in conjunction with a bound guide polynucleotide (e.g., gRNA), can specifically bind to a target polynucleotide sequence and thereby localize the base editor to the target nucleic acid sequence desired to be edited.

[0923] In certain embodiments, the gRNA is provided to the target cell in cis. For example, the gRNA can be comprised within the recombinant rabies virus genome. The gRNA can be comprised within the recombinant rabies virus genome at any location, for example, between a one or more rabies virus genes (e.g., an N gene or a P gene) and the nucleic acid encoding the nucleobase editor, or between two rabies virus genes, or at a terminal end of the recombinant rabies virus genome (e.g., the 5′ end, or the 3′ end).

[0924] In certain embodiments, the gRNA is provided to the target cell in trans (e.g., provided exogenously). For example, the gRNA can be comprises within a separate vector outside of the recombinant rabies virus particle. Suitable vectors include, without limitation, viral vectors, plasmids, and other known to those of skill in the art. In embodiments where the gRNA is provided to the target cell in trans, the gRNA vector is introduced into the target cell via various methods known to those of skill in the art, for example, without limitation, electroporation.

[0925] Methods for delivering a therapeutic transgene (e.g., a nucleobase editor) to a subject are also provided. In certain embodiments, the method comprises administering to the subject a recombinant rabies virus particle, wherein the recombinant virus particle comprises: a rabies virus glycoprotein; and a recombinant rabies virus genome comprising a nucleic acid encoding the therapeutic transgene (e.g., a nucleobase editor comprising a polynucleotide programmable nucleotide binding domain and a nucleobase editing domain), wherein: the genome lacks a G gene encoding for a rabies virus glycoprotein or a functional variant thereof; and/or the genome lacks an L gene encoding for a rabies virus polymerase or a functional variant thereof. In certain embodiments, the method comprises administering to the subject a recombinant rabies virus particle, wherein the recombinant virus particle comprises: a rabies virus glycoprotein; and a recombinant rabies virus genome comprising a nucleic acid encoding the therapeutic transgene (e.g., a nucleobase editor comprising a polynucleotide programmable nucleotide binding domain and a nucleobase editing domain), wherein: the genome lacks a G gene encoding for a rabies virus glycoprotein or a functional variant thereof. In certain embodiments, the method comprises administering to the subject a recombinant rabies virus particle, wherein the recombinant virus particle comprises: a rabies virus glycoprotein; and a recombinant rabies virus genome comprising a nucleic acid encoding the therapeutic transgene (e.g., a nucleobase editor comprising a polynucleotide programmable nucleotide binding domain and a nucleobase editing domain), wherein: the genome lacks a G gene encoding for a rabies virus glycoprotein or a functional variant thereof; and the genome lacks an L gene encoding for a rabies virus polymerase or a functional variant thereof.

[0926] The methods of delivery and/or expressing a therapeutic transgene (e.g., a nucleobase editor comprising a polynucleotide programmable nucleotide binding domain and a nucleobase editing domain) find use in the treatment of a disease or disorder. In certain embodiments, a method of treating a disease or disorder in a subject comprises administering a recombinant rabies virus particle described herein, or a pharmaceutical composition described herein. In certain embodiments, the disease or disorder is a neurologic disease or disorder. In certain embodiments, the disease or disorder is a ophthalmic disease or disorder.

[0927] Administration of the pharmaceutical compositions contemplated herein may be carried out using conventional techniques including, but not limited to, infusion, transfusion, or parenterally. In some embodiments, parenteral administration includes infusing or injecting intravascularly, intravenously, intramuscularly, intraarterially, intrathecally, intratumorally, intradermally, intraperitoneally, transtracheally, subcutaneously, subcuticularly, intraarticularly, subcapsularly, subarachnoidly and intrasternally.

[0928] The practice of the present invention employs, unless otherwise indicated, conventional techniques of molecular biology (including recombinant techniques), microbiology, cell biology, biochemistry and immunology, which are well within the purview of the skilled artisan. Such techniques are explained fully in the literature, such as, “Molecular Cloning: A Laboratory Manual”, second edition (Sambrook, 1989); “Oligonucleotide Synthesis” (Gait, 1984); “Animal Cell Culture” (Freshney, 1987); “Methods in Enzymology” “Handbook of Experimental Immunology” (Weir, 1996); “Gene Transfer Vectors for Mammalian Cells” (Miller and Calos, 1987); “Current Protocols in Molecular Biology” (Ausubel, 1987); “PCR: The Polymerase Chain Reaction”, (Mullis, 1994); “Current Protocols in Immunology” (Coligan, 1991). These techniques are applicable to the production of the polynucleotides and polypeptides of the invention, and, as such, may be considered in making and practicing the invention. Particularly useful techniques for particular embodiments will be discussed in the sections that follow.

[0929] The following examples are put forth so as to provide those of ordinary skill in the art with a complete disclosure and description of how to make and use the assay, screening, and therapeutic methods of the invention, and are not intended to limit the scope of what the inventors regard as their invention.

### K. Experimental Examples

### Example 1: Generation of Stable Cell Lines

[0930] The stable cell lines described in Table 16 below were generated:

TABLE 16
Stable cell lines

| Cell line name | Description | Integrating vector | Selection marker |
|---|---|---|---|
| RABV-G | HEK293T cell line | VIR120 | Blasticidin |
| | stably expressing | | |
| | rabies virus G gene | | |
| CA3.11 | HEK293T cell line | VIR069 | Blasticidin |
| | stably expressing | | |
| | rabies virus N, P, and | | |
| | L genes | | |
| CA4.27 | HEK293T cell line | VIR071 | Zeocin |
| | stably expressing | | |
| | rabies virus N, P, and | | |
| | L genes | | |

[0931] The Sleeping Beauty transposase system-compatible integrating vectors VIR120, VIR069, and VIR071 were co-transfected into HEK293T cells with the Sleeping Beauty transposase SB100X. VIR120 contains an expression cassette comprising a rabies virus G gene under the control of an EF1-alpha promoter; VIR069 contains an expression cassette comprising from 5′ to 3′: an EF1-alpha promoter, a rabies virus N gene, a T2A peptide, a rabies virus P gene, a P2A peptide, and a rabies virus L gene; and VIR071 contains a first expression cassette comprising from 5′ to 3′: an EF1-alpha promoter, a rabies virus M gene, a P2A peptide, a rabies virus P gene, an IRES, and a rabies virus N gene, and a second expression cassette comprising from 5′ to 3′: an RPBSA promoter, and a rabies virus L gene, wherein the first and the second expression cassettes are in opposite orientations.

[0932] One day after co-transfection, selection was begun using blasticidin or zeocin, depending on the integrating vector used. Selection continued through days 2 to 7 after co-transfection as necessary. By day 14, all surviving cells had the stably integrated transgene.

### Example 2: Production of Recombinant Rabies Virus Particles

[0933] For primary production, on day 0, Lipofectamine 3000 was used to transfect (i) 2 ug of complement plasmid mix of expression vectors, and (ii) 1 ug of plasmid encoding the rabies replicon, into a stable cell line. Transfections were performed according to Table 17:

TABLE 17
Transfection Mixes

| Stable cell line | Complement plasmid mix | Replicon |
|---|---|---|
| RABV-G | DNA52 | VIR045 “G-deleted” |
| RABV-G | DNA52 | VIR092 “G/L-deleted” |
| CA3.11 | VIR11 + DNA52 | VIR045 “G-deleted” |
| CA3.11 | VIR11 + DNA52 | VIR092 “G/L-deleted” |
| CA4.27 | VIR11 + DNA52 | VIR045 “G-deleted” |
| CA4.27 | VIR11 + DNA52 | VIR092 “G/L-deleted” |

[0934] The VIR045 replicon contains rabies SAD L16 full replicon with the G gene deleted. The VIR092 replicon was derived from VIR045 with the L gene further deleted. Both VIR045 and VIR092 contains sequence encoding GFP. DNA52 is an expression vector comprising a sequence encoding T7 RNA polymerase. VIR11 is an expression vector comprising a rabies virus G gene.

[0935] On day 1, media was changed to OptiMem+5% FBS (“O5”). Day 1 media was discarded. Beginning on day 3, viral supernatant was harvested and media was replaced with fresh O5 media daily. Viral supernatants from days 3-7 were pooled and stored at 4° C.

[0936] The pooled viral supernatants were clarified to remove cellular debris by centrifugation at 4000 rpm for 15 minutes. Viral particles were precipitated and concentrated following protocol for the Lenti-X Concentrator (Takara Bio). Supernatant was removed, and the pellet was resuspended in 05 media to produce concentrated viral stock. The concentrated viral stock was used to seed subsequent amplification passages.

[0937] Secondary viral amplification was performed as follows. On day 0, viral stock was added to stable cell lines. Additional plasmids were co-transfected into the stable cell lines at the time of transduction, if necessary. For viral stock produced using the VIR045 replicon, nothing additional was required when amplified in the RABV-G stable cell line. For viral stock produced using the VIR092 replicon, implication was performed in the following ways, with efficiency shown in parenthesis—more “+” indicates higher efficiency: (1) RABV-G stable cell line co-transfected with a plasmid containing the N, P, and L genes (+); (2) CA4.27 stable cell line co-transfected with a plasmid containing the G gene (++); and (3) CA4.27 stable cell line with the G gene further stably integrated (+++).

[0938] On day 1, media was changed to 05 media. Day 1 media was discarded. On days 2 to 7, viral supernatants were harvested and pooled.

[0939] In another experiment, GFP expression was compared between primary transfection cell lines HEK293T control cells, RABV-G, CA3.11, and CA4.27, transfected with either the VIR045 or the VIR092 replicon. Full complement plasmid mixes were co-transfected into each cell line. Table 18 shows qualitative levels of GFP expression based on images taken 8 days after primary transfection, where the more “+” indicates higher GFP expression.

TABLE 18
GFP Expression in Primary Transfection Cell Lines

| Replicon | HEK293T | RABV-G | CA3.11 | CA4.27 |
|---|---|---|---|---|
| VIR045 | + | +++++ | + | +++ |
| VIR092 | − | − | − | ++ |

[0940] Viral supernatants were collected daily on days 2 to 4, pooled, and concentrated by the Lenti-X Concentrator. The concentrated VIR045 viral supernatant was added to RABV-G cells and the concentration VIR092 viral supernatant was added to RABV-G cells transfected with a plasmid containing the N, P, and L genes. Qualitative levels of GFP expression, indicating production of recombinant rabies virus particles, based on images taken 2 days after transfection are shown in Table 19, where the more “+” indicates higher GFP expression.

TABLE 19
GFP Expression in First Amplification

| Replicon | HEK293T | RABV-G | CA3.11 | CA4.27 |
|---|---|---|---|---|
| VIR045 | + | +++++ | + | + |
| VIR092 | +++ | +++ | +++ | +++ |

[0941] In another experiment, recombinant rabies virus relative infectivity was determined for the viral supernatant obtained from using various stable cell lines were determined (FIG. 1).

[0942] Stable cell lines c1, c8, c39, c40, c53, and c54 were clonal cell lines derived from the CA3.11 stable cell line (“bulk”). BHK cell lines using integrating vector VIR069 (“BHK”), and integrating vector VIR120 (“BHK-G”) were also generated. CA4.27 cells were plated at 0.4, 0.6, 0.8, or 1 million cells per well.

[0943] Viral supernatant was harvested on different days (D2 or D3) and subsequently used to infect naive HEK293T cells at the volumes indicates on FIG. 1 (5 uL or 30 uL). Titering was performed by flow cytometry, showing the percentage of cells that were infected as determined by expression of GFP.

### Example 3: Recombinant Rabies Virus Particle Gene Delivery

[0944] To investigate whether recombinant rabies virus particles could be used for gene delivery, replicon VIR218 was generated. VIR218 was derived from VIR092 with the addition of sequence encoding the adenosine deaminase ABE7.10; FIG. 2A is a schematic of VIR218. FIG. 2B is a schemating showing the production and amplification scheme that was followed. Primary production was performed by co-transfecting VIR218 with a full complement plasmid mix into naive HEK293T cells. Secondary and tertiary amplifications were performed with additional transfection of a plasmid containing the N, P, and L genes on the RABV-G cell line. Viral supernatants were collected and concentrated as described above to produce a viral stock. The viral stock was then added to naive 293T cells together with transfecting via lipofection a plasmid comprising a gRNA targeting HEK2-2 (gaacacaaagcatagactgc; SEQ ID NO:4011), and optionally co-transfecting with a plasmid comprising the L gene (“supplemental L”). Genomic DNA was extracted and standard PCR/library preparation was performed to amplify out the genomic target and assess editing (FIG. 2C). As shown in FIG. 2C, A>G editing was detected in infected HEK293T cells.

### Example 4: Encoding gRNA into Rabies Genome with Cleaving tRNAs

[0945] To investigate whether gRNA could be encoded in the rabies viral genome, replicon VIR621 was generated in the organization shown in FIG. 3A. VIR621 was derived from DNA538 which encoded two flanking cleaving tRNAs and an intervening gRNA (FIG. 3B) with the addition of sequences encoding the polynucleotide programmable nucleotide binding domain and adenosine deaminase contained in ABE8 and the viral genome lacking the G gene (FIG. 3A). Multiple target tRNAs were also encoded between or after different tRNA combinations allowing for multiplexing (FIG. 3C, FIG. 3D). Several combinations of tRNAs and gRNAs as listed in Table 20 were tested for editing efficiency in FIG. 3E. As shown in FIG. 3E, A>G editing of HEK2 and IEDG genes was detected in infected HEK293T cells with viral replicons containing no gRNA (VIR596), single gRNA targeting HEK2 (VIR621, VIR622), single gRNA targeting IEDG (VIR712, VIR713), or multiplexed multiple gRNAs targeting HEK2 and IEDG in the same viral replicon (VIR714, VIR715, VIR717, VIR718, VIR719, VIR720, VIR627, VIR628, VIR629).

TABLE 20
tRNA and gRNA Replicons

| Vector | Vector | | |
|---|---|---|---|
| Name | Description | Insert Name | Insert Seq |
| VIR621 | SynV ΔG | tRNA Pro 3′ release | gtacaagTAAGAAGTTGAATAACAAAATGC |
| | ABE8-20- | tRNA-pro sequence | CGGAAATCTACGGATTGTGTATATCCAT |
| | 2a-GFP | in bold underlined | CATGAAAAAAACTAACACCCCTCCTTTC |
| | tRNA Pro- | text | GAACCATCCCAAACggctcgttggtctagggg |
| | Hek2 gRNA | | tatgattctcgcttagggtgcgagaggtcccgggttca |
| | | | aatcccggacgagcccGGAACACAAAGCATA |
| | | | GACTGCgttttagagctaGAAAtagcaagttaaaat |
| | | | aaggctagtccgttatcaacttgaaaaagtggcaccgagt |
| | | | cggtgcttttCGAGGAAGGAGGTCTGAGGAG |
| | | | GTCACTGcgaaccagtttgtgtcggctcgttggtcta |
| | | | ggggtatgattctcgcttagggtgcgagaggtcccg |
| | | | ggttcaaatcccggacgagccctctagaagtgctgggt |
| | | | catcta |
| VIR622 | SynV ΔG | tRNA Ile 3′ release | gtacaagTAAGAAGTTGAATAACAAAATGC |
| | ABE8-20- | tRNA-ile in bold | CGGAAATCTACGGATTGTGTATATCCAT |
| | 2a-GFP | underlined text | CATGAAAAAAACTAACACCCCTCCTTTC |
| | tRNA-Ile | | GAACCATCCCAAACgctccagtggcgcaatcg |
| | Hek2 gRNA | | gttagcgcgcggtacttataagacagtgcacctgtga |
| | | | gcaatgccgaggttgtgagttcaagcctcacctgga |
| | | | gcaGGAACACAAAGCATAGACTGCgttttag |
| | | | agctaGAAAtagcaagttaaaataaggctagtccgttat |
| | | | caacttgaaaaagtggcaccgagtcggtgcttCACAC |
| | | | ACACAAgctccagtggcgcaatcggttagcgcgcggt |
| | | | acttataagacagtgcaGCCgCGAGGAAGGAG |
| | | | GTCTGAGGAGGTCACTGcGGCcctgtgagc |
| | | | aatgccgaggttgtgagttcaagcctcacctggagcata |
| VIR623 | SynV ΔG | tRNA apical release | gtacaagTAAGAAGTTGAATAACAAAATGC |
| | ABE8-20- | | CGGAAATCTACGGATTGTGTATATCCAT |
| | 2a-GFP | | CATGAAAAAAACTAACACCCCTCCTTTC |
| | tRNA Ile- | | GAACCATCCCAAACgctccagtggcgcaatcggt |
| | apical Hek2 | | tagcgcgcggtacttataagacagtgcaGAACACAA |
| | gRNA | | AGCATAGACTGCgttttagagctaCCGAAAGG |
| | | | tagcaagttaaaataaggctagtccgttatcaacttgaaaa |
| | | | agtggcaccgagtcggtgcttcacacacacacaCGAG |
| | | | GAAGGAGGTCTGAGGAGGTCACTGcgcc |
| | | | tgtgagcaatgccgaggttgtgagttcaagcctcacctgg |
| | | | agcata |
| VIR624 | SynV ΔG | tRNA apical release | gtacaagTAAGAAGTTGAATAACAAAATGC |
| | ABE8-20- | with long linker | CGGAAATCTACGGATTGTGTATATCCAT |
| | 2a-GFP | | CATGAAAAAAACTAACACCCCTCCTTTC |
| | tRNA Ile- | | GAACCATCCCAAACgctccagtggcgcaatcggt |
| | Hek2 gRNA | | tagcgcgcggtacttataagacagtgcagGAACACA |
| | apical Hek2 | | AAGCATAGACTGCgttttagagctaCCGAAAG |
| | gRNA with | | GtagcaagttaaaaCaaggctagtccgttatcaacttga |
| | long linker | | aaaagtggcaccgagtcggtgctttGGCCCGAGGA |
| | | | AGGAGGTCTGAGGAGGTCACTGGGCCA |
| | | | AAACAACAACCCAACCAACAAACCAACA |
| | | | CCAAACAACAAACCAAACCCCAACAAAC |
| | | | AACCACCAACCCAAACAAcctgtgagcaatgc |
| | | | cgaggttgtgagttcaagcctcacctggagcata |
| VIR625 | SynV ΔG | tRNA apical release | gtacaagTAAGAAGTTGAATAACAAAATGC |
| | ABE8-20- | stabilized | CGGAAATCTACGGATTGTGTATATCCAT |
| | 2a-GFP | | CATGAAAAAAACTAACACCCCTCCTTTC |
| | tRNA Ile- | | GAACCATCCCAAACgctccagtggcgcaatcggt |
| | apical Hek2 | | tagcgcgcggtacttataagacagtgcaGGAGCCC |
| | gRNA with | | GAACACAAAGCATAGACTGCgttttagagcta |
| | long linker | | GGCCCGAGGAAGGAGGTCTGAGGAGG |
| | | | TCACTGGGCCtagcaagttaaaataaggctagtcc |
| | | | gttatcaacttgaaaaagtggcaccgagtcggtgcttAAA |
| | | | ACAACAACCCAACCAACAAACCAACACC |
| | | | AAACAACAAACCAAACCCCAACAAACAA |
| | | | CCACCAACCCAAACAAGGGCTCCcctgtg |
| | | | agcaatgccgaggttgtgagttcaagcctcacctggagc |
| | | | ata |
| VIR626 | SynV ΔG | tRNA Ile permuted | gtacaagTAAGAAGTTGAATAACAAAATGC |
| | ABE8-20- | | CGGAAATCTACGGATTGTGTATATCCAT |
| | 2a-GFP | | CATGAAAAAAACTAACACCCCTCCTTTC |
| | tRNA Ile | | GAACCATCCCAAACGGGCTCCcctgtgagc |
| | permuted | | aatgccgaggttgtgagttcaagcctcacctggagcaGA |
| | Hek2 gRNA | | AAgctccagtggcgcaatcggttagcgcgcggtacttata |
| | | | agacagtgcaGGAGCCCGAACACAAAGCAT |
| | | | AGACTGCgttttagagctaGGCCCGAGGAAG |
| | | | GAGGTCTGAGGAGGTCACTGGGCCtagc |
| | | | aagttaaaataaggctagtccgttatcaacttgaaaaagt |
| | | | ggcaccgagtcggtgcttAAAACAACAACCCAA |
| | | | CCAACAAACCAACACCAAACAACAAACC |
| | | | AAACCCCAACAAACAACCACCAACCCAA |
| | | | ACAAta |
| VIR627 | SynRV | P-IEDG-T-Hek2 | AACATCCCTCAAAagactcaaggaaagggctc |
| | tRNA-Pro- | tRNA-pro sequence | gttggtctaggggtatgattctcgcttagggtgcgaga |
| | Thr IEDG | in bold underlined | ggtcccgggttcaaatcccggacgagcccGcgtGt |
| | Hek2 ΔG | text | AgggTaaccatgaacGTTTTAGAGCTAGAAA |
| | Abe820m- | tRNA-thr sequence | TAGCAAGTTAAAATAAGGCTAGTCCGTT |
| | T2a- | in bold italicized text | ATCAACTTGAAAAAGTGGCACCGAGTC |
| | mScarlet | | GGTGCTTTTTTCACACACACAA [symbol] |
| | | | [symbol] [symbol] |
| | | | [symbol] [symbol] GGAACA |
| | | | CAAAGCATAGACTGCgttttagagctaGCCgC |
| | | | GAGGAAGGAGGTCTGAGGAGGTCACTG |
| | | | cGGCtagcaagttaaaataaggctagtccgttatcaactt |
| | | | gaaaaagtggcaccgagtcggtgctttttaaTTAAccga |
| | | | gaaaaaaa |
| VIR628 | SynRV | V-IEDG-K-Hek2 | AACATCCCTCAAAagactcaaggaaaggtttccg |
| | tRNA-Val- | | tagtgtagtggttatcacgttcgcctcacacgcgaaaggtc |
| | Lys IEDG | | cccggttcgaaaccgggcggaaacaGcgtGtAgggT |
| | Hek2 ΔG | | aaccatgaacGTTTTAGAGCTAGAAATAGC |
| | Abe820m- | | AAGTTAAAATAAGGCTAGTCCGTTATCA |
| | T2a- | | ACTTGAAAAAGTGGCACCGAGTCGGTG |
| | mScarlet | | CTTTTTTCACACACACAAgcccggctagctca |
| | | | gtcggtagagcatgagactcttaatctcagggtcgtgggtt |
| | | | cgagccccacgttgggcgGGAACACAAAGCAT |
| | | | AGACTGCgttttagagctaGCCgCGAGGAAG |
| | | | GAGGTCTGAGGAGGTCACTGcGGCtagc |
| | | | aagttaaaataaggctagtccgttatcaacttgaaaaagt |
| | | | ggcaccgagtcggtgctttttaaTTAAccgagaaaaaa |
| | | | a |
| VIR629 | SynRV | D-IEDG-G-Hek2-Q | AACATCCCTCAAAagactcaaggaaag [symbol] |
| | tRNA-Asp- | tRNA-asp D15 in | [symbol] [symbol] |
| | Gly-Glu | bold italicized text | [symbol] [symbol] GcgtGt |
| | IEDG Hek2 | tRNA-gly G8 in bold | AgggTaaccatgaacGTTTTAGAGCTAGAAA |
| | ΔG | underlined text | TAGCAAGTTAAAATAAGGCTAGTCCGTT |
| | Abe820m- | | ATCAACTTGAAAAAGTGGCACCGAGTC |
| | Abe820m- | | GGTGCTTTTTTCACACACACAAgcgttggt |
| | T2a- | | ggtatagtggtgagcatagctgccttccaagcagttg |
| | mScarlet | | acccgggttcgattcccggccaacgcaGGAACA |
| | | | CAAAGCATAGACTGCgttttagagctaGCCgC |
| | | | GAGGAAGGAGGTCTGAGGAGGTCACTG |
| | | | cGGCtagcaagttaaaataaggctagtccgttatcaactt |
| | | | gaaaaagtggcaccgagtcggtgctttCACACACAC |
| | | | AAtccttggtggtctagtggttaggattcggcgctctcaccg |
| | | | ccgcggcccgggttcgattcccggtcagggaattaaTTA |
| | | | Accgagaaaaaaa |
| VIR712 | SynRV | VIR622 insert | AACATCCCTCAAAagactcaaggaaaggctcca |
| | tRNA-Ile- | tRNA-ile in bold | gtggcgcaatcggttagcgcgcggtacttataagac |
| | Ile(corn) | underlined text | agtgcacctgtgagcaatgccgaggttgtgagttcaa |
| | IEDG Pacl | | gcctcacctggagcaGcgtGtAgggTaaccatgaac |
| | ΔG | | GTTTTAGAGCTAGAAATAGCAAGTTAAA |
| | Abe820m- | | ATAAGGCTAGTCCGTTATCAACTTGAAA |
| | T2a- | | AAGTGGCACCGAGTCGGTGCTTTTTTCA |
| | mScarlet | | CACACACAAgctccagtggcgcaatcggttagcgcg |
| | | | cggtacttataagacagtgcaGCCgCGAGGAAG |
| | | | GAGGTCTGAGGAGGTCACTGcGGCcctgt |
| | | | gagcaatgccgaggttgtgagttcaagcctcacctggag |
| | | | caTTAATTAAtccgagaaaaaaa |
| VIR713 | SynRV | 5′lle to Pacl | AACATCCCTCAAAagactcaaggaaaggctcca |
| | tRNA-Ile | tRNA-ile in bold | gtggcgcaatcggttagcgcgcggtacttataagac |
| | IEDG Pacl | underlined text | agtgcacctgtgagcaatgccgaggttgtgagttcaa |
| | ΔG | | gcctcacctggagcaGcgtGtAgggTaaccatgaac |
| | Abe820m- | | GTTTTAGAGCTAGAAATAGCAAGTTAAA |
| | T2a- | | ATAAGGCTAGTCCGTTATCAACTTGAAA |
| | mScarlet | | AAGTGGCACCGAGTCGGTGCTTTTTTaat |
| | | | taacgagaaaaaaa |
| VIR714 | SynRV | I-IEDG-I-Hek2 | AACATCCCTCAAAagactcaaggaaaggctcca |
| | tRNA-Ile- | tRNA-ile in bold | gtggcgcaatcggttagcgcgcggtacttataagac |
| | Ile(corn) | underlined text | agtgcacctgtgagcaatgccgaggttgtgagttcaa |
| | IEDG Hek2 | | gcctcacctggagcaGcgtGtAgggTaaccatgaac |
| | ΔG | | GTTTTAGAGCTAGAAATAGCAAGTTAAA |
| | Abe820m- | | ATAAGGCTAGTCCGTTATCAACTTGAAA |
| | T2a- | | AAGTGGCACCGAGTCGGTGCTTTTTTCA |
| | mScarlet | | CACACACAAgctccagtggcgcaatcggttagcgcg |
| | | | cggtacttataagacagtgcaGCCgCGAGGAAG |
| | | | GAGGTCTGAGGAGGTCACTGcGGCcctgt |
| | | | gagcaatgccgaggttgtgagttcaagcctcacctggag |
| | | | caGGAACACAAAGCATAGACTGCgttttaga |
| | | | gctaGCCgCGAGGAAGGAGGTCTGAGGA |
| | | | GGTCACTGcGGCtagcaagttaaaataaggctag |
| | | | tccgttatcaacttgaaaaagtggcaccgagtcggtgctttt |
| | | | tccgagaaaaaaa |
| VIR715 | SynRV | I-IEDG-G-Hek2 | AACATCCCTCAAAagactcaaggaaag [symbol] |
| | tRNA-Ile- | tRNA-ile in bold | [symbol] [symbol] |
| | Gly IEDG | italicized text | [symbol] [symbol] |
| | Hek2 ΔG | tRNA-gly G8 in bold | [symbol] GcgtGtAgggTaaccatgaac |
| | Abe820m- | underlined text | GTTTTAGAGCTAGAAATAGCAAGTTAAA |
| | T2a- | | ATAAGGCTAGTCCGTTATCAACTTGAAA |
| | mScarlet | | AAGTGGCACCGAGTCGGTGCTTTTTTCA |
| | | | CACACACAAgcgttggtggtatagtggtgagcat |
| | | | agctgccttccaagcagttgacccgggttcgattccc |
| | | | ggccaacgcaGGAACACAAAGCATAGACT |
| | | | GCgttttagagctaGCCgCGAGGAAGGAGGT |
| | | | CTGAGGAGGTCACTGcGGCtagcaagttaaa |
| | | | ataaggctagtccgttatcaacttgaaaaagtggcaccga |
| | | | gtcggtgctttttaaTTAAccgagaaaaaaa |
| VIR716 | SynRV | I-IEDG-K-Hek2 | AACATCCCTCAAAagactcaaggaaaggctcca |
| | tRNA-Ile- | tRNA-ile in bold | gtggcgcaatcggttagcgcgcggtacttataagac |
| | Lys IEDG | underlined text | agtgcacctgtgagcaatgccgaggttgtgagttcaa |
| | Hek2 ΔG | | gcctcacctggagcaGcgtGtAgggTaaccatgaac |
| | Abe820m- | | GTTTTAGAGCTAGAAATAGCAAGTTAAA |
| | T2a- | | ATAAGGCTAGTCCGTTATCAACTTGAAA |
| | mScarlet | | AAGTGGCACCGAGTCGGTGCTTTTTTCA |
| | | | CACACACAAgcccggctagctcagtcggtagagcat |
| | | | gagactcttaatctcagggtcgtgggttcgagccccacgtt |
| | | | gggcgGGAACACAAAGCATAGACTGCgtttt |
| | | | agagctaGCCgCGAGGAAGGAGGTCTGAG |
| | | | GAGGTCACTGcGGCtagcaagttaaaataaggc |
| | | | tagtccgttatcaacttgaaaaagtggcaccgagtcggtg |
| | | | ctttttaaTTAAccgagaaaaaaa |
| VIR717 | SynRV | I-IEDG-L-Hek2 | AACATCCCTCAAAagactcaaggaaaggctcca |
| | tRNA-Ile- | tRNA-ile in bold | gtggcgcaatcggttagcgcgcggtacttataagac |
| | Leu IEDG | underlined text | agtgcacctgtgagcaatgccgaggttgtgagttcaa |
| | Hek2 ΔG | | gcctcacctggagcaGcgtGtAgggTaaccatgaac |
| | Abe820m- | | GTTTTAGAGCTAGAAATAGCAAGTTAAA |
| | T2a- | | ATAAGGCTAGTCCGTTATCAACTTGAAA |
| | mScarlet | | AAGTGGCACCGAGTCGGTGCTTTTTTCA |
| | | | CACACACAAggtagcgtggccgagcggtctaaggc |
| | | | gctggattaaggctccagtctcttcgggggcgtgggttcga |
| | | | atcccaccgctgccaGGAACACAAAGCATAGA |
| | | | CTGCgttttagagctaGCCgCGAGGAAGGAG |
| | | | GTCTGAGGAGGTCACTGcGGCtagcaagtt |
| | | | aaaataaggctagtccgttatcaacttgaaaaagtggcac |
| | | | cgagtcggtgctttttaaTTAAccgagaaaaaaa |
| VIR718 | SynRV | I-IEDG-P-Hek2 | AACATCCCTCAAAagactcaaggaaag [symbol] |
| | tRNA-Ile- | tRNA-ile in bold | [symbol] [symbol] |
| | Pro IEDG | italicized text | [symbol] [symbol] |
| | Hek2 ΔG | tRNA-pro sequence | [symbol] GcgtGtAgggTaaccatgaac |
| | Abe820m- | in bold underlined | GTTTTAGAGCTAGAAATAGCAAGTTAAA |
| | T2a- | text | ATAAGGCTAGTCCGTTATCAACTTGAAA |
| | mScarlet | | AAGTGGCACCGAGTCGGTGCTTTTTTCA |
| | | | CACACACAAggctcgttggtctaggggtatgattc |
| | | | tcgcttagggtgcgagaggtcccgggttcaaatccc |
| | | | ggacgagcccGGAACACAAAGCATAGACT |
| | | | GCgttttagagctaGCCgCGAGGAAGGAGGT |
| | | | CTGAGGAGGTCACTGcGGCtagcaagttaaa |
| | | | ataaggctagtccgttatcaacttgaaaaagtggcaccga |
| | | | gtcggtgctttttaaTTAA |
| VIR719 | SynRV | I-IEDG-T-Hek2 | AACATCCCTCAAAagactcaaggaaaggctcca |
| | tRNA-Ile- | tRNA-ile in bold | gtggcgcaatcggttagcgcgcggtacttataagac |
| | Thr IEDG | underlined text | agtgcacctgtgagcaatgccgaggttgtgagttcaa |
| | Hek2 ΔG | tRNA-thr sequence | gcctcacctggagcaGcgtGtAgggTaaccatgaac |
| | Abe820m- | in bold italicized text | GTTTTAGAGCTAGAAATAGCAAGTTAAA |
| | T2a- | | ATAAGGCTAGTCCGTTATCAACTTGAAA |
| | mScarlet | | AAGTGGCACCGAGTCGGTGCTTTTTTCA |
| | | | CACACACAA [symbol] |
| | | | [symbol] [symbol] |
| | | | [symbol] GGAACACAAAGCATAGACT |
| | | | GCgttttagagctaGCCgCGAGGAAGGAGGT |
| | | | CTGAGGAGGTCACTGcGGCtagcaagttaaa |
| | | | ataaggctagtccgttatcaacttgaaaaagtggcaccga |
| | | | gtcggtgctttttaattaaccgagaaaaaaa |
| VIR720 | SynRV | I-IEDG-V-Hek2 | AACATCCCTCAAAagactcaaggaaaggctcca |
| | tRNA-Ile-Val | tRNA-ile in bold | gtggcgcaatcggttagcgcgcggtacttataagac |
| | IEDG Hek2 | underlined text | agtgcacctgtgagcaatgccgaggttgtgagttcaa |
| | | | gcctcacctggagcaGcgtGtAgggTaaccatgaac |
| | ΔG | | GTTTTAGAGCTAGAAATAGCAAGTTAAA |
| | Abe820m- | | ATAAGGCTAGTCCGTTATCAACTTGAAA |
| | T2a- | | AAGTGGCACCGAGTCGGTGCTTTTTTCA |
| | mScarlet | | CACACACAAgtttccgtagtgtagtggttatcacgttcg |
| | | | cctcacacgcgaaaggtccccggttcgaaaccgggcgg |
| | | | aaacaGGAACACAAAGCATAGACTGCgtttt |
| | | | agagctaGCCgCGAGGAAGGAGGTCTGAG |
| | | | GAGGTCACTGcGGCtagcaagttaaaataaggc |
| | | | tagtccgttatcaacttgaaaaagtggcaccgagtcggtg |
| | | | ctttttaaTTAAccgagaaaaaaa |

### DNA538 Sequence:

| | | | |
|---|---|---|---|
| DNA538 | EFS-tRNA- | tRNA-Pro-HEK2 | ggctcgttggtctaggggtatgattctcgcttagggtg |
| | Pro-HEK2 | gRNA | cgagaggtcccgggttcaaatcccggacgagcccG |
| | gRNA | tRNA-pro sequence | AACACAAAGCATAGACTGCgtCttagagcta |
| | | in bold underlined | GGCCCGAGGAAGGAGGTCTGAGGAGG |
| | | text | TCACTGGGCCtagcaagttaaGataaggctagtcc |
| | | | gttatcaacttgaaaaagtggcaccgagtcggtgcttaac |
| | | | cagtttgtgtcggctcgttggtctaggggtatgattctcg |
| | | | cttagggtgcgagaggtcccgggttcaaatcccgga |
| | | | cgagccc |

### VIR622 Sequence:

| | | | |
|---|---|---|---|
| VIR622 | VIR622 | ABE8-20- | ATGtccgaagtcgagttttcccatgagtactggatgagacacgcatt |
| | SynV delG | 2a-GFP | gactctcgcaaagagggctcgagatgaacgcgaggtgcccgtggg |
| | ABE8-20- | tRNA Ile- | ggcagtactcgtgctcaacaatcgcgtaatcggcgaaggttggaata |
| | 2a-GFP | Hek2 gRNA | gggcaatcggactccacgaccccactgcacatgcggaaatcatggc |
| | tRNA Ile- | tRNA-ile in | ccttcgacagggagggcttgtgatgcagaattatcgacttatcgatgcg |
| | Hek2 gRNA | bold | acgctgtacgtcacgtttgaaccttgcgtaatgtgcgcgggagctatga |
| | | underlined | ttcactcccgcattggacgagttgtattcggtgttcgcaacgccaagac |
| | | text | gggtgccgcaggttcactgatggacgtgctgcattacccaggcatga |
| | | | accaccgggtagaaatcacagaaggcatattggcggacgaatgtgc |
| | | | ggcgctgttgtgttacttttttcgcatgcccaggcgtgtctttaacgccca |
| | | | gaaaaaagcacaatcctctactgactctggtggttcttctggtggttcta |
| | | | gcggcagcgagactcccgggacctcagagtccgccacacccgaa |
| | | | agttctggtggttcttctggtggttctgacaagaagtacagcatcggcct |
| | | | ggccatcggcaccaactctgtgggctgggccgtgatcaccgacgagt |
| | | | acaaggtgcccagcaagaaattcaaggtgctgggcaacaccgacc |
| | | | ggcacagcatcaagaagaacctgatcggagccctgctgttcgacag |
| | | | cggcgaaacagccgaggccacccggctgaagagaaccgccaga |
| | | | agaagatacaccagacggaagaaccggatctgctatctgcaagag |
| | | | atcttcagcaacgagatggccaaggtggacgacagcttcttccacag |
| | | | actggaagagtccttcctggtggaagaggataagaagcacgagcg |
| | | | gcaccccatcttcggcaacatcgtggacgaggtggcctaccacgag |
| | | | aagtaccccaccatctaccacctgagaaagaaactggtggacagc |
| | | | accgacaaggccgacctgcggctgatctatctggccctggcccacat |
| | | | gatcaagttccggggccacttcctgatcgagggcgacctgaaccccg |
| | | | acaacagcgacgtggacaagctgttcatccagctggtgcagaccta |
| | | | caaccagctgttcgaggaaaaccccatcaacgccagcggcgtgga |
| | | | cgccaaggccatcctgtctgccagactgagcaagagcagacggctg |
| | | | gaaaatctgatcgcccagctgcccggcgagaagaagaatggcctgt |
| | | | tcggaaacctgattgccctgagcctgggcctgacccccaacttcaag |
| | | | agcaacttcgacctggccgaggatgccaaactgcagctgagcaag |
| | | | gacacctacgacgacgacctggacaacctgctggcccagatcggc |
| | | | gaccagtacgccgacctgtttctggccgccaagaacctgtccgacgc |
| | | | catcctgctgagcgacatcctgagagtgaacaccgagatcaccaag |
| | | | gcccccctgagcgcctctatgatcaagagatacgacgagcaccacc |
| | | | aggacctgaccctgctgaaagctctcgtgcggcagcagctgcctgag |
| | | | aagtacaaagagattttcttcgaccagagcaagaacggctacgccg |
| | | | gctacattgacggcggagccagccaggaagagttctacaagttcatc |
| | | | aagcccatcctggaaaagatggacggcaccgaggaactgctcgtg |
| | | | aagctgaacagagaggacctgctgcggaagcagcggaccttcgac |
| | | | aacggcagcatcccccaccagatccacctgggagagctgcacgcc |
| | | | attctgcggcggcaggaagatttttacccattcctgaaggacaaccgg |
| | | | gaaaagatcgagaagatcctgaccttccgcatcccctactacgtggg |
| | | | ccctctggccaggggaaacagcagattcgcctggatgaccagaaa |
| | | | gagcgaggaaaccatcaccccctggaacttcgaggaagtggtgga |
| | | | caagggcgcttccgcccagagcttcatcgagcggatgaccaacttcg |
| | | | ataagaacctgcccaacgagaaggtgctgcccaagcacagcctgct |
| | | | gtacgagtacttcaccgtgtataacgagctgaccaaagtgaaatacgt |
| | | | gaccgagggaatgagaaagcccgccttcctgagcggcgagcaga |
| | | | aaaaggccatcgtggacctgctgttcaagaccaaccggaaagtgac |
| | | | cgtgaagcagctgaaagaggactacttcaagaaaatcgagtgcttc |
| | | | gactccgtggaaatctccggcgtggaagatcggttcaacgcctccctg |
| | | | ggcacataccacgatctgctgaaaattatcaaggacaaggacttcct |
| | | | ggacaatgaggaaaacgaggacattctggaagatatcgtgctgacc |
| | | | ctgacactgtttgaggacagagagatgatcgaggaacggctgaaaa |
| | | | cctatgcccacctgttcgacgacaaagtgatgaagcagctgaagcg |
| | | | gcggagatacaccggctggggcaggctgagccggaagctgatcaa |
| | | | cggcatccgggacaagcagtccggcaagacaatcctggatttcctg |
| | | | aagtccgacggcttcgccaacagaaacttcatgcagctgatccacga |
| | | | cgacagcctgacctttaaagaggacatccagaaagcccaggtgtcc |
| | | | ggccagggcgatagcctgcacgagcacattgccaatctggccggca |
| | | | gccccgccattaagaagggcatcctgcagacagtgaaggtggtgga |
| | | | cgagctcgtgaaagtgatgggccggcacaagcccgagaacatcgt |
| | | | gatcgaaatggccagagagaaccagaccacccagaagggacag |
| | | | aagaacagccgcgagagaatgaagcggatcgaagagggcatca |
| | | | aagagctgggcagccagatcctgaaagaacaccccgtggaaaac |
| | | | acccagctgcagaacgagaagctgtacctgtactacctgcagaatg |
| | | | ggcgggatatgtacgtggaccaggaactggacatcaaccggctgtc |
| | | | cgactacgatgtggaccatatcgtgcctcagagctttctgaaggacga |
| | | | ctccatcgacaacaaggtgctgaccagaagcgacaagaaccggg |
| | | | gcaagagcgacaacgtgccctccgaagaggtcgtgaagaagatga |
| | | | agaactactggcggcagctgctgaacgccaagctgattacccagag |
| | | | aaagttcgacaatctgaccaaggccgagagaggcggcctgagcga |
| | | | actggataaggccggcttcatcaagagacagctggtggaaacccgg |
| | | | cagatcacaaagcacgtggcacagatcctggactcccggatgaac |
| | | | actaagtacgacgagaatgacaagctgatccgggaagtgaaagtg |
| | | | atcaccctgaagtccaagctggtgtccgatttccggaaggatttccagt |
| | | | tttacaaagtgcgcgagatcaacaactaccaccacgcccacgacgc |
| | | | ctacctgaacgccgtcgtgggaaccgccctgatcaaaaagtacccta |
| | | | agctggaaagcgagttcgtgtacggcgactacaaggtgtacgacgt |
| | | | gcggaagatgatcgccaagagcgagcaggaaatcggcaaggcta |
| | | | ccgccaagtacttcttctacagcaacatcatgaactttttcaagaccga |
| | | | gattaccctggccaacggcgagatccggaagcggcctctgatcgag |
| | | | acaaacggcgaaaccggggagatcgtgtgggataagggccggga |
| | | | ttttgccaccgtgcggaaagtgctgagcatgccccaagtgaatatcgt |
| | | | gaaaaagaccgaggtgcagacaggcggcttcagcaaagagtctat |
| | | | cctgcccaagaggaacagcgataagctgatcgccagaaagaagg |
| | | | actgggaccctaagaagtacggcggcttcgacagccccaccgtggc |
| | | | ctattctgtgctggtggtggccaaagtggaaaagggcaagtccaaga |
| | | | aactgaagagtgtgaaagagctgctggggatcaccatcatggaaag |
| | | | aagcagcttcgagaagaatcccatcgactttctggaagccaagggct |
| | | | acaaagaagtgaaaaaggacctgatcatcaagctgcctaagtactc |
| | | | cctgttcgagctggaaaacggccggaagagaatgctggcctctgcc |
| | | | ggcgaactgcagaagggaaacgaactggccctgccctccaaatat |
| | | | gtgaacttcctgtacctggccagccactatgagaagctgaagggctc |
| | | | ccccgaggataatgagcagaaacagctgtttgtggaacagcacaag |
| | | | cactacctggacgagatcatcgagcagatcagcgagttctccaaga |
| | | | gagtgatcctggccgacgctaatctggacaaagtgctgtccgcctac |
| | | | aacaagcaccgggataagcccatcagagagcaggccgagaatat |
| | | | catccacctgtttaccctgaccaatctgggagcccctgccgccttcaag |
| | | | tactttgacaccaccatcgaccggaagaggtacaccagcaccaaag |
| | | | aggtgctggacgccaccctgatccaccagagcatcaccggcctgta |
| | | | cgagacacggatcgacctgtctcagctgggaggtgacgagggagct |
| | | | gataagcgcaccgccgatggttccgagttcgaaagccccaagaag |
| | | | aagaggaaagtcGAATTCGGCAGTGGAGAGGGCAG |
| | | | AGGgtccCTGCTAACATGCGGTGACGTCGAGGA |
| | | | GAATCCtGGcCCaatggtgagcaagggcgaggagctgttcac |
| | | | cggggtggtgcccatcctggtcgagctggacggcgacgtaaacggc |
| | | | cacaagttcagcgtgtccggcgagggcgagggcgatgccacctac |
| | | | ggcaagctgaccctgaagttcatctgcaccaccggcaagctgcccgt |
| | | | gccctggcccaccctcgtgaccaccctgacctacggcgtgcagtgctt |
| | | | cagccgctaccccgaccacatgaagcagcacgacttcttcaagtcc |
| | | | gccatgcccgaaggctacgtccaggagcgcaccatcttcttcaagga |
| | | | cgacggcaactacaagacccgcgccgaggtgaagttcgagggcg |
| | | | acaccctggtgaaccgcatcgagctgaagggcatcgacttcaagga |
| | | | ggacggcaacatcctggggcacaagctggagtacaactacaacag |
| | | | ccacaacgtctatatcatggccgacaagcagaagaacggcatcaa |
| | | | ggtgaacttcaagatccgccacaacatcgaggacggcagcgtgca |
| | | | gctcgccgaccactaccagcagaacacccccatcggcgacggccc |
| | | | cgtgctgctgcccgacaaccactacctgagcacccagtccgccctga |
| | | | gcaaagaccccaacgagaagcgcgatcacatggtcctgctggagtt |
| | | | cgtgaccgccgccgggatcactctcggcatggacgagctgtacaag |
| | | | TAAGAAGTTGAATAACAAAATGCCGGAAATCTA |
| | | | CGGATTGTGTATATCCATCATGAAAAAAACTAAC |
| | | | ACCCCTCCTTTCGAACCATCCCAAACgctccagtg |
| | | | gcgcaatcggttagcgcgcggtacttataagacagtgcacctgt |
| | | | gagcaatgccgaggttgtgagttcaagcctcacctggagcaG |
| | | | GAACACAAAGCATAGACTGCgttttagagctaGAAAta |
| | | | gcaagttaaaataaggctagtccgttatcaacttgaaaaagtggcac |
| | | | cgagtcggtgcttCACACACACAAgctccagtggcgcaatcgg |
| | | | ttagcgcgcggtacttataagacagtgcaGCCgCGAGGAAG |
| | | | GAGGTCTGAGGAGGTCACTGcGGCcctgtgagcaat |
| | | | gccgaggttgtgagttcaagcctcacctggagcata |

tRNA-qRNA-tRNA CASSETTE (IN vir622):
gctccagtggcgcaatcggttagcgcgcggtacttataagacagtgcacctgtgagcaatgccgaggttgtgagttcaagc
ctcacctggagcaGGAACACAAAGCATAGACTGCgttttagagctaGAAAtagcaagttaaaataaggctagtccgttatc
aacttgaaaaagtggcaccgagtcggtgcttCACACACACAAgctccagtggcgcaatcggttagcgcgcggtacttataa
gacagtgcaGCCgCGAGGAAGGAGGTCTGAGGAGGTCACTGcGGCcctgtgagcaatgccgaggttgtgagttcaagcctc
acctggagca

### Example 5: Initial gRNA Release Screen with tRNAs and tRNA-Like Molecules

[0948] Additional tRNAs and tRNA-like molecules were tested in an initial screen to determine the ability for the adjacent gRNA to be processed and ultimately used for mediating base editing. For each experiment described in Example 5, 293T cells were co-transfected with a vector encoding a base editor (ABE8.20) and a vector encoding the tRNA-gRNA cassette. Each tRNA-gRNA cassette was under the control of an EFS promoter. Specifically, 1.3e4 293T cells were seeded into each well of a 96 well plate the day before transfection. 50 ng of the base editor vector and 50 ng of the gRNA vector were co-transfected into each well using Lipofectamine 3000. Samples were sequenced for editing 4 days post transfection. The results were plotted as % A>G editing. The gRNA used targeted the HEK site, as described above, except where otherwise noted.

Flanked Vs. Non-Flanked gRNAs and Minimal Rnase P or Rnase Z Substrates:

[0949] The difference between flanked and non-flanked gRNAs was tested. A flanked gRNA comprises, from 5′ to 3′, a tRNA, a gRNA, and a tRNA. For example, “tRNA-Pro” means a proline tRNA is 5′ to a gRNA, while “tRNA-Pro-flank” means a proline tRNA is 5′ and 3′ to a gRNA. As shown in FIG. 4A, robust editing occurred regardless of whether the gRNA was flanked or not. Editing was often equal to or better than a U6 promoter-driven control of a gRNA without a tRNA (U6::HEK2). Moreover, numerous types of tRNA were employed, each one allowing the gRNA to mediate robust base editing. Specifically, tRNA-arg, tRNA-asp, tRNA-gly, tRNA-ile, tRNA-pro, tRNA-ser, and tRNA-thr were tested.

[0950] In addition to the tRNA-gRNA cassettes described above, several minimal substrates for Rnase P and Rnase Z were tested. The minimal substrates tested were ATM5 ATSer, and miniEGS, each driven by a U6 promoter. The various minimal substrates are further described in Nashimoto et al. (Biochemistry. 38: 12089-12096. 1999; describing ATM5), and Kikovska et al. (Nucleic Acids Research. 33(6): 2012-2021. 2005; describing ATSer), each of which is incorporated herein by reference. Nucleic acid sequences encoding the minimal substrates are recited below:

(ATSer; SEQ ID NO: 4049)
GATCTGAATGGAGAGAGGGGGTTCAAATCCCCCTCTCTCCGC;
(ATM5; SEQ ID NO: 4050)
GGGCCAGCCAGGTTCGACTCCTGGCTGGCTCGGTGTATTT;
(miniEGS; SEQ ID NO: 4051)
GGTGGGGCCAGCTCCTGAAGGTTCGAATCCTTCCCCCACC.

[0951] As shown in FIG. 4A, several minimal substrates were effective at releasing the gRNA to mediate base editing.

tRNA-Like Structures:

[0952] A tRNA-like structure is an RNA with at least secondary structure that may be processed (e.g., cleaved) to release an adjacent gRNA connected to said tRNA-like structure. MALAT1-associated small cytoplasmic RNA (mascRNA) are non-coding RNAs found in the cytosol. They are processed from a longer non-coding RNA called MALAT1 by the enzyme RNase P. To test the ability of mascRNA to delivery expressed gRNA for base editing, various mascRNA were tested from several different species. As shown in FIG. 4B, although low, base editing was above background for the mascRNA-gRNA cassettes.

tRNA Variants:

[0953] tRNA variants were tested in similar tRNA-gRNA cassette as above. Specifically, several tRNA-pro and tRNA-thr variants were tested and compared against a stable cell line expressing a gRNA or a U6 driven gRNA without a tRNA. As shown in FIG. 4C, a tRNA-pro and tRNA-thr variant were effective at mediating robust base editing.

tRNA Fragments and Other RnaseZ or RnaseP Substrates:

[0954] tRNA fragments and other RnaseZ or RnaseP substrates were tested in similar tRNA-gRNA cassette as above. For fragments, the tRNA was split in half while maintaining the Rnase processing site and connected to a gRNA. As an alternative, a tRNA was split by inserting the gRNA in between. As shown in FIG. 4D, although low, base editing was above background for the tested tRNA fragment-gRNA cassettes.

Viral tRNA-Like Structures (vtRNAs):

[0955] The vtRNAs used in this experiment were derived from gamma-Herpes virus (GHV68). These vtRNAs are expressed from viral genomes and processed by cellular machinery much like an endogenous tRNA. The vtRNAs are described in more detail in Bowden et al. (J. Gen Virol. 78: 1675-1687. 1997), incorporated herein by reference. Each gRNA expression cassette was constructed as follows, from 5′ to 3′, EFS (Pol II promoter)-rabies transcriptional start sequence-tRNA-gRNA-poly A. A EFS promoter alone driving a gRNA normally would result in no editing (EFS control), whereas in the presence of tRNA, editing occurs. As shown in FIG. 5, all tested vtRNAs (vt_1 through vt_8) yielded detectable base editing at three different target sites (HEK2, SOD1, and ALAS1). Additional non-viral tRNAs tested previously were used in this experiment. P corresponds to a tRNA-pro, T corresponds to a tRNA-thr, G8 corresponds to a tRNA-gly, G27 corresponds to a different tRNA-gly, L corresponds to a tRNA-leu, and D15 corresponds to a tRNA-Asp. Each non-viral tRNA also displayed robust base editing.

[0956] The SOD1 and ALAS1 gRNA spacer sequences used are recited below:

SOD1:
(SEQ ID NO: 4052)
UAAAUAGGCUGUACCAGUGC
ALAS1:
(SEQ ID NO: 4053)
CAGGAUCCGCACAGACUCCA

### Example 6: tRNA-gRNA Cassettes in Various RABV Genome Architectures

[0957] Several of the tRNA-gRNA cassettes were next inserted into different RABV genome architectures to test for base editing. As shown in FIG. 6A, tRNA-gRNA cassettes were placed in several positions with a ΔG, ΔGL, and ΔMGL RABV genome that co-expressed a nucleobase editor. The following rabies viral replicons were used:

| | Replicon | | |
|---|---|---|---|
| Construct | Type | Target | Position |
| VIR1001 | ΔG | ALAS1 | post M |
| VIR1002 | ΔG | ALAS1 | post P |
| VIR1003 | ΔG | ALAS1 | post N |
| VIR1004 | ΔGL | ALAS1 | post M |
| VIR1005 | ΔGL | ALAS1 | post P |
| VIR1006 | ΔGL | ALAS1 | post N |
| VIR1007 | ΔMGL | ALAS1 | post P |
| VIR1008 | ΔMGL | ALAS1 | post N |
| VIR1017 | ΔG | SOD1 | post M |
| VIR1018 | ΔG | SOD1 | post P |
| VIR1019 | ΔG | SOD1 | post N |
| VIR1020 | ΔGL | SOD1 | post M |
| VIR1021 | ΔGL | SOD1 | post P |
| VIR1022 | ΔGL | SOD1 | post N |
| VIR1023 | ΔMGL | SOD1 | post P |
| VIR1024 | ΔMGL | SOD1 | post N |

[0958] The replicons were transfected into rabies producer cells and viral supernatant was collected. Genomic DNA from the producer cells were harvested at 4 days post-infection and sequences for editing at the indicated loci (SOD1 or ALAS1). As shown in FIG. 6B, base editing was detected in all tested RABV genome architectures, demonstrating the effectiveness of the tRNA-gRNA cassette for delivery of a gRNA in a negative-strand RNA virus (e.g., rabies).

### Other Embodiments

[0959] From the foregoing description, it will be apparent that variations and modifications may be made to the invention described herein to adopt it to various usages and conditions. Such embodiments are also within the scope of the following claims.

[0960] The recitation of a listing of elements in any definition of a variable herein includes definitions of that variable as any single element or combination (or subcombination) of listed elements. The recitation of an embodiment herein includes that embodiment as any single embodiment or in combination with any other embodiments or portions thereof.

[0961] All patents and publications mentioned in this specification are herein incorporated by reference to the same extent as if each independent patent and publication was specifically and individually indicated to be incorporated by reference.

L. SEQUENCE LISTING

| | SEQ ID | |
|---|---|---|
| Description | NO: | Sequence |
| Adenosine | 8 | MSEVEFSHEYWMRHALTLAKRARDEREVPVGAVLVLNNRVIGEGW |
| Deaminase | | NRAIGLHDPTAHAEIMALRQGGLVMQNYRLIDATLYVTFEPCVMCA |
| Reference | | GAMIHSRIGRVVFGVRNAKTGAAGSLMDVLHYPGMNHRVEITEGIL |
| Sequence | | ADECAALLCYFFRMPRQVFNAQKKAQSSTD |
| BhCas12b | 274 | GCCACCATGGCCCCAAAGAAGAAGCGGAAGGTCGGTATCCACG |
| GGSGGS-ABE8- | | GAGTCCCAGCAGCCGCCACCAGATCCTTCATCCTGAAGATCGA |
| Xten20 at P153 | | GCCCAACGAGGAAGTGAAGAAAGGCCTCTGGAAAACCCACGAG |
| polynucleotide | | GTGCTGAACCACGGAATCGCCTACTACATGAATATCCTGAAGCT |
| | | GATCCGGCAAGAGGCCATCTACGAGCACCACGAGCAGGACCCC |
| | | AAGAATCCCAAGAAGGTGTCCAAGGCCGAGATCCAGGCCGAGC |
| | | TGTGGGATTTCGTGCTGAAGATGCAGAAGTGCAACAGCTTCACA |
| | | CACGAGGTGGACAAGGACGAGGTGTTCAACATCCTGAGAGAGC |
| | | TGTACGAGGAACTGGTGCCCAGCAGCGTGGAAAAGAAGGGCGA |
| | | AGCCAACCAGCTGAGCAACAAGTTTCTGTACCCTCTGGTGGACC |
| | | CCAACAGCCAGTCTGGAAAGGGAACAGCCAGCAGCGGCAGAAA |
| | | GCCCAGATGGTACAACCTGAAGATTGCCGGCGATCCCGGAGGC |
| | | TCTGGAGGAAGCTCCGAAGTCGAGTTTTCCCATGAGTACTGGAT |
| | | GAGACACGCATTGACTCTCGCAAAGAGGGCTCGAGATGAACGC |
| | | GAGGTGCCCGTGGGGGCAGTACTCGTGCTCAACAATCGCGTAA |
| | | TCGGCGAAGGTTGGAATAGGGCAATCGGACTCCACGACCCCAC |
| | | TGCACATGCGGAAATCATGGCCCTTCGACAGGGAGGGCTTGTG |
| | | ATGCAGAATTATCGACTTTATGATGCGACGCTGTACGTCACGTTT |
| | | GAACCTTGCGTAATGTGCGCGGGAGCTATGATTCACTCCCGCAT |
| | | TGGACGAGTTGTATTCGGTGTTCGCAACGCCAAGACGGGTGCC |
| | | GCAGGTTCACTGATGGACGTGCTGCATCATCCAGGCATGAACCA |
| | | CCGGGTAGAAATCACAGAAGGCATATTGGCGGACGAATGTGCG |
| | | GCGCTGTTGTGTCGTTTTTTTCGCATGCCCAGGCGGGTCTTTAA |
| | | CGCCCAGAAAAAAGCACAATCCTCTACTGACGGCTCTTCTGGAT |
| | | CTGAAACACCTGGCACAAGCGAGAGCGCCACCCCTGAGAGCTC |
| | | TGGCTCCTGGGAAGAAGAGAAGAAGAAGTGGGAAGAAGATAAG |
| | | AAAAAGGACCCGCTGGCCAAGATCCTGGGCAAGCTGGCTGAGT |
| | | ACGGACTGATCCCTCTGTTCATCCCCTACACCGACAGCAACGAG |
| | | CCCATCGTGAAAGAAATCAAGTGGATGGAAAAGTCCCGGAACCA |
| | | GAGCGTGCGGCGGCTGGATAAGGACATGTTCATTCAGGCCCTG |
| | | GAACGGTTCCTGAGCTGGGAGAGCTGGAACCTGAAAGTGAAAG |
| | | AGGAATACGAGAAGGTCGAGAAAGAGTACAAGACCCTGGAAGA |
| | | GAGGATCAAAGAGGACATCCAGGCTCTGAAGGCTCTGGAACAG |
| | | TATGAGAAAGAGCGGCAAGAACAGCTGCTGCGGGACACCCTGA |
| | | ACACCAACGAGTACCGGCTGAGCAAGAGAGGCCTTAGAGGCTG |
| | | GCGGGAAATCATCCAGAAATGGCTGAAAATGGACGAGAACGAG |
| | | CCCTCCGAGAAGTACCTGGAAGTGTTCAAGGACTACCAGCGGA |
| | | AGCACCCTAGAGAGGCCGGCGATTACAGCGTGTACGAGTTCCT |
| | | GTCCAAGAAAGAGAACCACTTCATCTGGCGGAATCACCCTGAGT |
| | | ACCCCTACCTGTACGCCACCTTCTGCGAGATCGACAAGAAAAAG |
| | | AAGGACGCCAAGCAGCAGGCCACCTTCACACTGGCCGATCCTA |
| | | TCAATCACCCTCTGTGGGTCCGATTCGAGGAAAGAAGCGGCAG |
| | | CAACCTGAACAAGTACAGAATCCTGACCGAGCAGCTGCACACC |
| | | GAGAAGCTGAAGAAAAAGCTGACAGTGCAGCTGGACCGGCTGA |
| | | TCTACCCTACAGAATCTGGCGGCTGGGAAGAGAAGGGCAAAGT |
| | | GGACATTGTGCTGCTGCCCAGCCGGCAGTTCTACAACCAGATCT |
| | | TCCTGGACATCGAGGAAAAGGGCAAGCACGCCTTCACCTACAA |
| | | GGATGAGAGCATCAAGTTCCCTCTGAAGGGCACACTCGGCGGA |
| | | GCCAGAGTGCAGTTCGACAGAGATCACCTGAGAAGATACCCTCA |
| | | CAAGGTGGAAAGCGGCAACGTGGGCAGAATCTACTTCAACATG |
| | | ACCGTGAACATCGAGCCTACAGAGTCCCCAGTGTCCAAGTCTCT |
| | | GAAGATCCACCGGGACGACTTCCCCAAGGTGGTCAACTTCAAG |
| | | CCCAAAGAACTGACCGAGTGGATCAAGGACAGCAAGGGCAAGA |
| | | AACTGAAGTCCGGCATCGAGTCCCTGGAAATCGGCCTGAGAGT |
| | | GATGAGCATCGACCTGGGACAGAGACAGGCCGCTGCCGCCTCT |
| | | ATTTTCGAGGTGGTGGATCAGAAGCCCGACATCGAAGGCAAGC |
| | | TGTTTTTCCCAATCAAGGGCACCGAGCTGTATGCCGTGCACAGA |
| | | GCCAGCTTCAACATCAAGCTGCCCGGCGAGACACTGGTCAAGA |
| | | GCAGAGAAGTGCTGCGGAAGGCCAGAGAGGACAATCTGAAACT |
| | | GATGAACCAGAAGCTCAACTTCCTGCGGAACGTGCTGCACTTCC |
| | | AGCAGTTCGAGGACATCACCGAGAGAGAGAAGCGGGTCACCAA |
| | | GTGGATCAGCAGACAAGAGAACAGCGACGTGCCCCTGGTGTAC |
| | | CAGGATGAGCTGATCCAGATCCGCGAGCTGATGTACAAGCCTTA |
| | | CAAGGACTGGGTCGCCTTCCTGAAGCAGCTCCACAAGAGACTG |
| | | GAAGTCGAGATCGGCAAAGAAGTGAAGCACTGGCGGAAGTCCC |
| | | TGAGCGACGGAAGAAAGGGCCTGTACGGCATCTCCCTGAAGAA |
| | | CATCGACGAGATCGATCGGACCCGGAAGTTCCTGCTGAGATGG |
| | | TCCCTGAGGCCTACCGAACCTGGCGAAGTGCGTAGACTGGAAC |
| | | CCGGCCAGAGATTCGCCATCGACCAGCTGAATCACCTGAACGC |
| | | CCTGAAAGAAGATCGGCTGAAGAAGATGGCCAACACCATCATCA |
| | | TGCACGCCCTGGGCTACTGCTACGACGTGCGGAAGAAGAAATG |
| | | GCAGGCTAAGAACCCCGCCTGCCAGATCATCCTGTTCGAGGAT |
| | | CTGAGCAACTACAACCCCTACGAGGAAAGGTCCCGCTTCGAGA |
| | | ACAGCAAGCTCATGAAGTGGTCCAGACGCGAGATCCCCAGACA |
| | | GGTTGCACTGCAGGGCGAGATCTATGGCCTGCAAGTGGGAGAA |
| | | GTGGGCGCTCAGTTCAGCAGCAGATTCCACGCCAAGACAGGCA |
| | | GCCCTGGCATCAGATGTAGCGTCGTGACCAAAGAGAAGCTGCA |
| | | GGACAATCGGTTCTTCAAGAATCTGCAGAGAGAGGGCAGACTG |
| | | ACCCTGGACAAAATCGCCGTGCTGAAAGAGGGCGATCTGTACC |
| | | CAGACAAAGGCGGCGAGAAGTTCATCAGCCTGAGCAAGGATCG |
| | | GAAGTGCGTGACCACACACGCCGACATCAACGCCGCTCAGAAC |
| | | CTGCAGAAGCGGTTCTGGACAAGAACCCACGGCTTCTACAAGG |
| | | TGTACTGCAAGGCCTACCAGGTGGACGGCCAGACCGTGTACAT |
| | | CCCTGAGAGCAAGGACCAGAAGCAGAAGATCATCGAAGAGTTC |
| | | GGCGAGGGCTACTTCATTCTGAAGGACGGGGTGTACGAATGGG |
| | | TCAACGCCGGCAAGCTGAAAATCAAGAAGGGCAGCTCCAAGCA |
| | | GAGCAGCAGCGAGCTGGTGGATAGCGACATCCTGAAAGACAGC |
| | | TTCGACCTGGCCTCCGAGCTGAAAGGCGAAAAGCTGATGCTGT |
| | | ACAGGGACCCCAGCGGCAATGTGTTCCCCAGCGACAAATGGAT |
| | | GGCCGCTGGCGTGTTCTTCGGAAAGCTGGAACGCATCCTGATC |
| | | AGCAAGCTGACCAACCAGTACTCCATCAGCACCATCGAGGACG |
| | | ACAGCAGCAAGCAGTCTATGAAAAGGCCGGCGGCCACGAAAAA |
| | | GGCCGGCCAGGCAAAAAAGAAAAAGGGATCCTACCCATACGAT |
| | | GTTCCAGATTACGCTTATCCCTACGACGTGCCTGATTATGCATAC |
| | | CCATATGATGTCCCCGACTATGCCTAA |
| BhCas12b | 275 | MAPKKKRKVGIHGVPAAATRSFILKIEPNEEVKKGLWKTHEVLNHGI |
| GGSGGS-ABE8- | | AYYMNILKLIRQEAIYEHHEQDPKNPKKVSKAEIQAELWDFVLKMQK |
| Xten20 at P153 | | CNSFTHEVDKDEVFNILRELYEELVPSSVEKKGEANQLSNKFLYPLV |
| polypeptide | | DPNSQSGKGTASSGRKPRWYNLKIAGDPGGSGGSSEVEFSHEYW |
| | | MRHALTLAKRARDEREVPVGAVLVLNNRVIGEGWNRAIGLHDPTA |
| | | HAEIMALRQGGLVMQNYRLYDATLYVTFEPCVMCAGAMIHSRIGRV |
| | | VFGVRNAKTGAAGSLMDVLHHPGMNHRVEITEGILADECAALLCRF |
| | | FRMPRRVFNAQKKAQSSTDGSSGSETPGTSESATPESSGSWEEE |
| | | KKKWEEDKKKDPLAKILGKLAEYGLIPLFIPYTDSNEPIVKEIKWMEK |
| | | SRNQSVRRLDKDMFIQALERFLSWESWNLKVKEEYEKVEKEYKTL |
| | | EERIKEDIQALKALEQYEKERQEQLLRDTLNTNEYRLSKRGLRGWR |
| | | EIIQKWLKMDENEPSEKYLEVFKDYQRKHPREAGDYSVYEFLSKKE |
| | | NHFIWRNHPEYPYLYATFCEIDKKKKDAKQQATFTLADPINHPLWW |
| | | RFEERSGSNLNKYRILTEQLHTEKLKKKLTVQLDRLIYPTESGGWEE |
| | | KGKVDIVLLPSRQFYNQIFLDIEEKGKHAFTYKDESIKFPLKGTLGGA |
| | | RVQFDRDHLRRYPHKVESGNVGRIYFNMTVNIEPTESPVSKSLKIH |
| | | RDDFPKVVNFKPKELTEWIKDSKGKKLKSGIESLEIGLRVMSIDLGQ |
| | | RQAAAASIFEVVDQKPDIEGKLFFPIKGTELYAVHRASFNIKLPGETL |
| | | VKSREVLRKAREDNLKLMNQKLNFLRNVLHFQQFEDITEREKRVTK |
| | | WISRQENSDVPLVYQDELIQIRELMYKPYKDWAFLKQLHKRLEVEI |
| | | GKEVKHWRKSLSDGRKGLYGISLKNIDEIDRTRKFLLRWSLRPTEP |
| | | GEVRRLEPGQRFAIDQLNHLNALKEDRLKKMANTIIMHALGYCYDV |
| | | RKKKWQAKNPACQIILFEDLSNYNPYEERSRFENSKLMKWSRREIP |
| | | RQVALQGEIYGLQVGEVGAQFSSRFHAKTGSPGIRCSVVTKEKLQ |
| | | DNRFFKNLQREGRLTLDKIAVLKEGDLYPDKGGEKFISLSKDRKCVT |
| | | THADINAAQNLQKRFWTRTHGFYKVYCKAYQVDGQTVYIPESKDQ |
| | | KQKIIEEFGEGYFILKDGVYEWNAGKLKIKKGSSKQSSSELVDSDIL |
| | | KDSFDLASELKGEKLMLYRDPSGNVFPSDKWMAAGVFFGKLERILI |
| | | SKLTNQYSISTIEDDSSKQSMKRPAATKKAGQAKKKKGSYPYDVPD |
| | | YAYPYDVPDYAYPYDVPDYA |
| BhCas12b | 276 | GCCACCATGGCCCCAAAGAAGAAGCGGAAGGTCGGTATCCACG |
| GGSGGS-ABE8- | | GAGTCCCAGCAGCCGCCACCAGATCCTTCATCCTGAAGATCGA |
| Xten20 at K255 | | GCCCAACGAGGAAGTGAAGAAAGGCCTCTGGAAAACCCACGAG |
| polynucleotide | | GTGCTGAACCACGGAATCGCCTACTACATGAATATCCTGAAGCT |
| | | GATCCGGCAAGAGGCCATCTACGAGCACCACGAGCAGGACCCC |
| | | AAGAATCCCAAGAAGGTGTCCAAGGCCGAGATCCAGGCCGAGC |
| | | TGTGGGATTTCGTGCTGAAGATGCAGAAGTGCAACAGCTTCACA |
| | | CACGAGGTGGACAAGGACGAGGTGTTCAACATCCTGAGAGAGC |
| | | TGTACGAGGAACTGGTGCCCAGCAGCGTGGAAAAGAAGGGCGA |
| | | AGCCAACCAGCTGAGCAACAAGTTTCTGTACCCTCTGGTGGACC |
| | | CCAACAGCCAGTCTGGAAAGGGAACAGCCAGCAGCGGCAGAAA |
| | | GCCCAGATGGTACAACCTGAAGATTGCCGGCGATCCCTCCTGG |
| | | GAAGAAGAGAAGAAGAAGTGGGAAGAAGATAAGAAAAAGGACC |
| | | CGCTGGCCAAGATCCTGGGCAAGCTGGCTGAGTACGGACTGAT |
| | | CCCTCTGTTCATCCCCTACACCGACAGCAACGAGCCCATCGTGA |
| | | AAGAAATCAAGTGGATGGAAAAGTCCCGGAACCAGAGCGTGCG |
| | | GCGGCTGGATAAGGACATGTTCATTCAGGCCCTGGAACGGTTC |
| | | CTGAGCTGGGAGAGCTGGAACCTGAAAGTGAAAGAGGAATACG |
| | | AGAAGGTCGAGAAAGAGTACAAGACCCTGGAAGAGAGGATCAA |
| | | AGGAGGCTCTGGAGGAAGCTCCGAAGTCGAGTTTTCCCATGAG |
| | | TACTGGATGAGACACGCATTGACTCTCGCAAAGAGGGCTCGAG |
| | | ATGAACGCGAGGTGCCCGTGGGGGCAGTACTCGTGCTCAACAA |
| | | TCGCGTAATCGGCGAAGGTTGGAATAGGGCAATCGGACTCCAC |
| | | GACCCCACTGCACATGCGGAAATCATGGCCCTTCGACAGGGAG |
| | | GGCTTGTGATGCAGAATTATCGACTTTATGATGCGACGCTGTAC |
| | | GTCACGTTTGAACCTTGCGTAATGTGCGCGGGAGCTATGATTCA |
| | | CTCCCGCATTGGACGAGTTGTATTCGGTGTTCGCAACGCCAAGA |
| | | CGGGTGCCGCAGGTTCACTGATGGACGTGCTGCATCATCCAGG |
| | | CATGAACCACCGGGTAGAAATCACAGAAGGCATATTGGCGGAC |
| | | GAATGTGCGGCGCTGTTGTGTCGTTTTTTTCGCATGCCCAGGCG |
| | | GGTCTTTAACGCCCAGAAAAAAGCACAATCCTCTACTGACGGCT |
| | | CTTCTGGATCTGAAACACCTGGCACAAGCGAGAGCGCCACCCC |
| | | TGAGAGCTCTGGCGAGGACATCCAGGCTCTGAAGGCTCTGGAA |
| | | CAGTATGAGAAAGAGCGGCAAGAACAGCTGCTGCGGGACACCC |
| | | TGAACACCAACGAGTACCGGCTGAGCAAGAGAGGCCTTAGAGG |
| | | CTGGCGGGAAATCATCCAGAAATGGCTGAAAATGGACGAGAAC |
| | | GAGCCCTCCGAGAAGTACCTGGAAGTGTTCAAGGACTACCAGC |
| | | GGAAGCACCCTAGAGAGGCCGGCGATTACAGCGTGTACGAGTT |
| | | CCTGTCCAAGAAAGAGAACCACTTCATCTGGCGGAATCACCCTG |
| | | AGTACCCCTACCTGTACGCCACCTTCTGCGAGATCGACAAGAAA |
| | | AAGAAGGACGCCAAGCAGCAGGCCACCTTCACACTGGCCGATC |
| | | CTATCAATCACCCTCTGTGGGTCCGATTCGAGGAAAGAAGCGGC |
| | | AGCAACCTGAACAAGTACAGAATCCTGACCGAGCAGCTGCACAC |
| | | CGAGAAGCTGAAGAAAAAGCTGACAGTGCAGCTGGACCGGCTG |
| | | ATCTACCCTACAGAATCTGGCGGCTGGGAAGAGAAGGGCAAAG |
| | | TGGACATTGTGCTGCTGCCCAGCCGGCAGTTCTACAACCAGATC |
| | | TTCCTGGACATCGAGGAAAAGGGCAAGCACGCCTTCACCTACAA |
| | | GGATGAGAGCATCAAGTTCCCTCTGAAGGGCACACTCGGCGGA |
| | | GCCAGAGTGCAGTTCGACAGAGATCACCTGAGAAGATACCCTCA |
| | | CAAGGTGGAAAGCGGCAACGTGGGCAGAATCTACTTCAACATG |
| | | ACCGTGAACATCGAGCCTACAGAGTCCCCAGTGTCCAAGTCTCT |
| | | GAAGATCCACCGGGACGACTTCCCCAAGGTGGTCAACTTCAAG |
| | | CCCAAAGAACTGACCGAGTGGATCAAGGACAGCAAGGGCAAGA |
| | | AACTGAAGTCCGGCATCGAGTCCCTGGAAATCGGCCTGAGAGT |
| | | GATGAGCATCGACCTGGGACAGAGACAGGCCGCTGCCGCCTCT |
| | | ATTTTCGAGGTGGTGGATCAGAAGCCCGACATCGAAGGCAAGC |
| | | TGTTTTTCCCAATCAAGGGCACCGAGCTGTATGCCGTGCACAGA |
| | | GCCAGCTTCAACATCAAGCTGCCCGGCGAGACACTGGTCAAGA |
| | | GCAGAGAAGTGCTGCGGAAGGCCAGAGAGGACAATCTGAAACT |
| | | GATGAACCAGAAGCTCAACTTCCTGCGGAACGTGCTGCACTTCC |
| | | AGCAGTTCGAGGACATCACCGAGAGAGAGAAGCGGGTCACCAA |
| | | GTGGATCAGCAGACAAGAGAACAGCGACGTGCCCCTGGTGTAC |
| | | CAGGATGAGCTGATCCAGATCCGCGAGCTGATGTACAAGCCTTA |
| | | CAAGGACTGGGTCGCCTTCCTGAAGCAGCTCCACAAGAGACTG |
| | | GAAGTCGAGATCGGCAAAGAAGTGAAGCACTGGCGGAAGTCCC |
| | | TGAGCGACGGAAGAAAGGGCCTGTACGGCATCTCCCTGAAGAA |
| | | CATCGACGAGATCGATCGGACCCGGAAGTTCCTGCTGAGATGG |
| | | TCCCTGAGGCCTACCGAACCTGGCGAAGTGCGTAGACTGGAAC |
| | | CCGGCCAGAGATTCGCCATCGACCAGCTGAATCACCTGAACGC |
| | | CCTGAAAGAAGATCGGCTGAAGAAGATGGCCAACACCATCATCA |
| | | TGCACGCCCTGGGCTACTGCTACGACGTGCGGAAGAAGAAATG |
| | | GCAGGCTAAGAACCCCGCCTGCCAGATCATCCTGTTCGAGGAT |
| | | CTGAGCAACTACAACCCCTACGAGGAAAGGTCCCGCTTCGAGA |
| | | ACAGCAAGCTCATGAAGTGGTCCAGACGCGAGATCCCCAGACA |
| | | GGTTGCACTGCAGGGCGAGATCTATGGCCTGCAAGTGGGAGAA |
| | | GTGGGCGCTCAGTTCAGCAGCAGATTCCACGCCAAGACAGGCA |
| | | GCCCTGGCATCAGATGTAGCGTCGTGACCAAAGAGAAGCTGCA |
| | | GGACAATCGGTTCTTCAAGAATCTGCAGAGAGAGGGCAGACTG |
| | | ACCCTGGACAAAATCGCCGTGCTGAAAGAGGGCGATCTGTACC |
| | | CAGACAAAGGCGGCGAGAAGTTCATCAGCCTGAGCAAGGATCG |
| | | GAAGTGCGTGACCACACACGCCGACATCAACGCCGCTCAGAAC |
| | | CTGCAGAAGCGGTTCTGGACAAGAACCCACGGCTTCTACAAGG |
| | | TGTACTGCAAGGCCTACCAGGTGGACGGCCAGACCGTGTACAT |
| | | CCCTGAGAGCAAGGACCAGAAGCAGAAGATCATCGAAGAGTTC |
| | | GGCGAGGGCTACTTCATTCTGAAGGACGGGGTGTACGAATGGG |
| | | TCAACGCCGGCAAGCTGAAAATCAAGAAGGGCAGCTCCAAGCA |
| | | GAGCAGCAGCGAGCTGGTGGATAGCGACATCCTGAAAGACAGC |
| | | TTCGACCTGGCCTCCGAGCTGAAAGGCGAAAAGCTGATGCTGT |
| | | ACAGGGACCCCAGCGGCAATGTGTTCCCCAGCGACAAATGGAT |
| | | GGCCGCTGGCGTGTTCTTCGGAAAGCTGGAACGCATCCTGATC |
| | | AGCAAGCTGACCAACCAGTACTCCATCAGCACCATCGAGGACG |
| | | ACAGCAGCAAGCAGTCTATGAAAAGGCCGGCGGCCACGAAAAA |
| | | GGCCGGCCAGGCAAAAAAGAAAAAGGGATCCTACCCATACGAT |
| | | GTTCCAGATTACGCTTATCCCTACGACGTGCCTGATTATGCATAC |
| | | CCATATGATGTCCCCGACTATGCCTAA |
| BhCas12b | 277 | MAPKKKRKVGIHGVPAAATRSFILKIEPNEEVKKGLWKTHEVLNHGI |
| GGSGGS-ABE8- | | AYYMNILKLIRQEAIYEHHEQDPKNPKKVSKAEIQAELWDFVLKMQK |
| Xten20 at K255 | | CNSFTHEVDKDEVFNILRELYEELVPSSVEKKGEANQLSNKFLYPLV |
| polypeptide | | DPNSQSGKGTASSGRKPRWYNLKIAGDPSWEEEKKKWEEDKKKD |
| | | PLAKILGKLAEYGLIPLFIPYTDSNEPIVKEIKWMEKSRNQSVRRLDK |
| | | DMFIQALERFLSWESWNLKVKEEYEKVEKEYKTLEERIKGGSGGSS |
| | | EVEFSHEYWMRHALTLAKRARDEREVPVGAVLVLNNRVIGEGWNR |
| | | AIGLHDPTAHAEIMALRQGGLVMQNYRLYDATLYVTFEPCVMCAGA |
| | | MIHSRIGRVVFGVRNAKTGAAGSLMDVLHHPGMNHRVEITEGILAD |
| | | ECAALLCRFFRMPRRVFNAQKKAQSSTDGSSGSETPGTSESATPE |
| | | SSGEDIQALKALEQYEKERQEQLLRDTLNTNEYRLSKRGLRGWREI |
| | | IQKWLKMDENEPSEKYLEVFKDYQRKHPREAGDYSVYEFLSKKEN |
| | | HFIWRNHPEYPYLYATFCEIDKKKKDAKQQATFTLADPINHPLWVRF |
| | | EERSGSNLNKYRILTEQLHTEKLKKKLTVQLDRLIYPTESGGWEEK |
| | | GKVDIVLLPSRQFYNQIFLDIEEKGKHAFTYKDESIKFPLKGTLGGAR |
| | | VQFDRDHLRRYPHKVESGNVGRIYFNMTVNIEPTESPVSKSLKIHR |
| | | DDFPKVVNFKPKELTEWIKDSKGKKLKSGIESLEIGLRVMSIDLGQR |
| | | QAAAASIFEVVDQKPDIEGKLFFPIKGTELYAVHRASFNIKLPGETLV |
| | | KSREVLRKAREDNLKLMNQKLNFLRNVLHFQQFEDITEREKRVTKW |
| | | ISRQENSDVPLVYQDELIQIRELMYKPYKDWAFLKQLHKRLEVEIG |
| | | KEVKHWRKSLSDGRKGLYGISLKNIDEIDRTRKFLLRWSLRPTEPG |
| | | EVRRLEPGQRFAIDQLNHLNALKEDRLKKMANTIIMHALGYCYDVR |
| | | KKKWQAKNPACQIILFEDLSNYNPYEERSRFENSKLMKWSRREIPR |
| | | QVALQGEIYGLQVGEVGAQFSSRFHAKTGSPGIRCSVVTKEKLQD |
| | | NRFFKNLQREGRLTLDKIAVLKEGDLYPDKGGEKFISLSKDRKCVTT |
| | | HADINAAQNLQKRFWTRTHGFYKVYCKAYQVDGQTVYIPESKDQK |
| | | QKIIEEFGEGYFILKDGVYEWNAGKLKIKKGSSKQSSSELVDSDILK |
| | | DSFDLASELKGEKLMLYRDPSGNVFPSDKWMAAGVFFGKLERILIS |
| | | KLTNQYSISTIEDDSSKQSMKRPAATKKAGQAKKKKGSYPYDVPDY |
| | | AYPYDVPDYAYPYDVPDYA |
| BhCas12b | 278 | GCCACCATGGCCCCAAAGAAGAAGCGGAAGGTCGGTATCCACG |
| GGSGGS-ABE8- | | GAGTCCCAGCAGCCGCCACCAGATCCTTCATCCTGAAGATCGA |
| Xten20 at D306 | | GCCCAACGAGGAAGTGAAGAAAGGCCTCTGGAAAACCCACGAG |
| polynucleotide | | GTGCTGAACCACGGAATCGCCTACTACATGAATATCCTGAAGCT |
| | | GATCCGGCAAGAGGCCATCTACGAGCACCACGAGCAGGACCCC |
| | | AAGAATCCCAAGAAGGTGTCCAAGGCCGAGATCCAGGCCGAGC |
| | | TGTGGGATTTCGTGCTGAAGATGCAGAAGTGCAACAGCTTCACA |
| | | CACGAGGTGGACAAGGACGAGGTGTTCAACATCCTGAGAGAGC |
| | | TGTACGAGGAACTGGTGCCCAGCAGCGTGGAAAAGAAGGGCGA |
| | | AGCCAACCAGCTGAGCAACAAGTTTCTGTACCCTCTGGTGGACC |
| | | CCAACAGCCAGTCTGGAAAGGGAACAGCCAGCAGCGGCAGAAA |
| | | GCCCAGATGGTACAACCTGAAGATTGCCGGCGATCCCTCCTGG |
| | | GAAGAAGAGAAGAAGAAGTGGGAAGAAGATAAGAAAAAGGACC |
| | | CGCTGGCCAAGATCCTGGGCAAGCTGGCTGAGTACGGACTGAT |
| | | CCCTCTGTTCATCCCCTACACCGACAGCAACGAGCCCATCGTGA |
| | | AAGAAATCAAGTGGATGGAAAAGTCCCGGAACCAGAGCGTGCG |
| | | GCGGCTGGATAAGGACATGTTCATTCAGGCCCTGGAACGGTTC |
| | | CTGAGCTGGGAGAGCTGGAACCTGAAAGTGAAAGAGGAATACG |
| | | AGAAGGTCGAGAAAGAGTACAAGACCCTGGAAGAGAGGATCAA |
| | | AGAGGACATCCAGGCTCTGAAGGCTCTGGAACAGTATGAGAAA |
| | | GAGCGGCAAGAACAGCTGCTGCGGGACACCCTGAACACCAACG |
| | | AGTACCGGCTGAGCAAGAGAGGCCTTAGAGGCTGGCGGGAAAT |
| | | CATCCAGAAATGGCTGAAAATGGACGGAGGCTCTGGAGGAAGC |
| | | TCCGAAGTCGAGTTTTCCCATGAGTACTGGATGAGACACGCATT |
| | | GACTCTCGCAAAGAGGGCTCGAGATGAACGCGAGGTGCCCGTG |
| | | GGGGCAGTACTCGTGCTCAACAATCGCGTAATCGGCGAAGGTT |
| | | GGAATAGGGCAATCGGACTCCACGACCCCACTGCACATGCGGA |
| | | AATCATGGCCCTTCGACAGGGAGGGCTTGTGATGCAGAATTATC |
| | | GACTTTATGATGCGACGCTGTACGTCACGTTTGAACCTTGCGTA |
| | | ATGTGCGCGGGAGCTATGATTCACTCCCGCATTGGACGAGTTGT |
| | | ATTCGGTGTTCGCAACGCCAAGACGGGTGCCGCAGGTTCACTG |
| | | ATGGACGTGCTGCATCATCCAGGCATGAACCACCGGGTAGAAAT |
| | | CACAGAAGGCATATTGGCGGACGAATGTGCGGCGCTGTTGTGT |
| | | CGTTTTTTTCGCATGCCCAGGCGGGTCTTTAACGCCCAGAAAAA |
| | | AGCACAATCCTCTACTGACGGCTCTTCTGGATCTGAAACACCTG |
| | | GCACAAGCGAGAGCGCCACCCCTGAGAGCTCTGGCGAGAACGA |
| | | GCCCTCCGAGAAGTACCTGGAAGTGTTCAAGGACTACCAGCGG |
| | | AAGCACCCTAGAGAGGCCGGCGATTACAGCGTGTACGAGTTCC |
| | | TGTCCAAGAAAGAGAACCACTTCATCTGGCGGAATCACCCTGAG |
| | | TACCCCTACCTGTACGCCACCTTCTGCGAGATCGACAAGAAAAA |
| | | GAAGGACGCCAAGCAGCAGGCCACCTTCACACTGGCCGATCCT |
| | | ATCAATCACCCTCTGTGGGTCCGATTCGAGGAAAGAAGCGGCA |
| | | GCAACCTGAACAAGTACAGAATCCTGACCGAGCAGCTGCACAC |
| | | CGAGAAGCTGAAGAAAAAGCTGACAGTGCAGCTGGACCGGCTG |
| | | ATCTACCCTACAGAATCTGGCGGCTGGGAAGAGAAGGGCAAAG |
| | | TGGACATTGTGCTGCTGCCCAGCCGGCAGTTCTACAACCAGATC |
| | | TTCCTGGACATCGAGGAAAAGGGCAAGCACGCCTTCACCTACAA |
| | | GGATGAGAGCATCAAGTTCCCTCTGAAGGGCACACTCGGCGGA |
| | | GCCAGAGTGCAGTTCGACAGAGATCACCTGAGAAGATACCCTCA |
| | | CAAGGTGGAAAGCGGCAACGTGGGCAGAATCTACTTCAACATG |
| | | ACCGTGAACATCGAGCCTACAGAGTCCCCAGTGTCCAAGTCTCT |
| | | GAAGATCCACCGGGACGACTTCCCCAAGGTGGTCAACTTCAAG |
| | | CCCAAAGAACTGACCGAGTGGATCAAGGACAGCAAGGGCAAGA |
| | | AACTGAAGTCCGGCATCGAGTCCCTGGAAATCGGCCTGAGAGT |
| | | GATGAGCATCGACCTGGGACAGAGACAGGCCGCTGCCGCCTCT |
| | | ATTTTCGAGGTGGTGGATCAGAAGCCCGACATCGAAGGCAAGC |
| | | TGTTTTTCCCAATCAAGGGCACCGAGCTGTATGCCGTGCACAGA |
| | | GCCAGCTTCAACATCAAGCTGCCCGGCGAGACACTGGTCAAGA |
| | | GCAGAGAAGTGCTGCGGAAGGCCAGAGAGGACAATCTGAAACT |
| | | GATGAACCAGAAGCTCAACTTCCTGCGGAACGTGCTGCACTTCC |
| | | AGCAGTTCGAGGACATCACCGAGAGAGAGAAGCGGGTCACCAA |
| | | GTGGATCAGCAGACAAGAGAACAGCGACGTGCCCCTGGTGTAC |
| | | CAGGATGAGCTGATCCAGATCCGCGAGCTGATGTACAAGCCTTA |
| | | CAAGGACTGGGTCGCCTTCCTGAAGCAGCTCCACAAGAGACTG |
| | | GAAGTCGAGATCGGCAAAGAAGTGAAGCACTGGCGGAAGTCCC |
| | | TGAGCGACGGAAGAAAGGGCCTGTACGGCATCTCCCTGAAGAA |
| | | CATCGACGAGATCGATCGGACCCGGAAGTTCCTGCTGAGATGG |
| | | TCCCTGAGGCCTACCGAACCTGGCGAAGTGCGTAGACTGGAAC |
| | | CCGGCCAGAGATTCGCCATCGACCAGCTGAATCACCTGAACGC |
| | | CCTGAAAGAAGATCGGCTGAAGAAGATGGCCAACACCATCATCA |
| | | TGCACGCCCTGGGCTACTGCTACGACGTGCGGAAGAAGAAATG |
| | | GCAGGCTAAGAACCCCGCCTGCCAGATCATCCTGTTCGAGGAT |
| | | CTGAGCAACTACAACCCCTACGAGGAAAGGTCCCGCTTCGAGA |
| | | ACAGCAAGCTCATGAAGTGGTCCAGACGCGAGATCCCCAGACA |
| | | GGTTGCACTGCAGGGCGAGATCTATGGCCTGCAAGTGGGAGAA |
| | | GTGGGCGCTCAGTTCAGCAGCAGATTCCACGCCAAGACAGGCA |
| | | GCCCTGGCATCAGATGTAGCGTCGTGACCAAAGAGAAGCTGCA |
| | | GGACAATCGGTTCTTCAAGAATCTGCAGAGAGAGGGCAGACTG |
| | | ACCCTGGACAAAATCGCCGTGCTGAAAGAGGGCGATCTGTACC |
| | | CAGACAAAGGCGGCGAGAAGTTCATCAGCCTGAGCAAGGATCG |
| | | GAAGTGCGTGACCACACACGCCGACATCAACGCCGCTCAGAAC |
| | | CTGCAGAAGCGGTTCTGGACAAGAACCCACGGCTTCTACAAGG |
| | | TGTACTGCAAGGCCTACCAGGTGGACGGCCAGACCGTGTACAT |
| | | CCCTGAGAGCAAGGACCAGAAGCAGAAGATCATCGAAGAGTTC |
| | | GGCGAGGGCTACTTCATTCTGAAGGACGGGGTGTACGAATGGG |
| | | TCAACGCCGGCAAGCTGAAAATCAAGAAGGGCAGCTCCAAGCA |
| | | GAGCAGCAGCGAGCTGGTGGATAGCGACATCCTGAAAGACAGC |
| | | TTCGACCTGGCCTCCGAGCTGAAAGGCGAAAAGCTGATGCTGT |
| | | ACAGGGACCCCAGCGGCAATGTGTTCCCCAGCGACAAATGGAT |
| | | GGCCGCTGGCGTGTTCTTCGGAAAGCTGGAACGCATCCTGATC |
| | | AGCAAGCTGACCAACCAGTACTCCATCAGCACCATCGAGGACG |
| | | ACAGCAGCAAGCAGTCTATGAAAAGGCCGGCGGCCACGAAAAA |
| | | GGCCGGCCAGGCAAAAAAGAAAAAGGGATCCTACCCATACGAT |
| | | GTTCCAGATTACGCTTATCCCTACGACGTGCCTGATTATGCATAC |
| | | CCATATGATGTCCCCGACTATGCCTAA |
| BhCas12b | 279 | MAPKKKRKVGIHGVPAAATRSFILKIEPNEEVKKGLWKTHEVLNHGI |
| GGSGGS-ABE8- | | AYYMNILKLIRQEAIYEHHEQDPKNPKKVSKAEIQAELWDFVLKMQK |
| Xten20 at D306 | | CNSFTHEVDKDEVFNILRELYEELVPSSVEKKGEANQLSNKFLYPLV |
| polypeptide | | DPNSQSGKGTASSGRKPRWYNLKIAGDPSWEEEKKKWEEDKKKD |
| | | PLAKILGKLAEYGLIPLFIPYTDSNEPIVKEIKWMEKSRNQSVRRLDK |
| | | DMFIQALERFLSWESWNLKVKEEYEKVEKEYKTLEERIKEDIQALKA |
| | | LEQYEKERQEQLLRDTLNTNEYRLSKRGLRGWREIIQKWLKMDGG |
| | | SGGSSEVEFSHEYWMRHALTLAKRARDEREVPVGAVLVLNNRVIG |
| | | EGWNRAIGLHDPTAHAEIMALRQGGLVMQNYRLYDATLYVTFEPC |
| | | VMCAGAMIHSRIGRVVFGVRNAKTGAAGSLMDVLHHPGMNHRVEI |
| | | TEGILADECAALLCRFFRMPRRVFNAQKKAQSSTDGSSGSETPGT |
| | | SESATPESSGENEPSEKYLEVFKDYQRKHPREAGDYSVYEFLSKK |
| | | ENHFIWRNHPEYPYLYATFCEIDKKKKDAKQQATFTLADPINHPLW |
| | | VRFEERSGSNLNKYRILTEQLHTEKLKKKLTVQLDRLIYPTESGGWE |
| | | EKGKVDIVLLPSRQFYNQIFLDIEEKGKHAFTYKDESIKFPLKGTLGG |
| | | ARVQFDRDHLRRYPHKVESGNVGRIYFNMTVNIEPTESPVSKSLKI |
| | | HRDDFPKVVNFKPKELTEWIKDSKGKKLKSGIESLEIGLRVMSIDLG |
| | | QRQAAAASIFEVVDQKPDIEGKLFFPIKGTELYAVHRASFNIKLPGET |
| | | LVKSREVLRKAREDNLKLMNQKLNFLRNVLHFQQFEDITEREKRVT |
| | | KWISRQENSDVPLVYQDELIQIRELMYKPYKDWAFLKQLHKRLEV |
| | | EIGKEVKHWRKSLSDGRKGLYGISLKNIDEIDRTRKFLLRWSLRPTE |
| | | PGEVRRLEPGQRFAIDQLNHLNALKEDRLKKMANTIIMHALGYCYD |
| | | VRKKKWQAKNPACQIILFEDLSNYNPYEERSRFENSKLMKWSRREI |
| | | PRQVALQGEIYGLQVGEVGAQFSSRFHAKTGSPGIRCSVVTKEKLQ |
| | | DNRFFKNLQREGRLTLDKIAVLKEGDLYPDKGGEKFISLSKDRKCVT |
| | | THADINAAQNLQKRFWTRTHGFYKVYCKAYQVDGQTVYIPESKDQ |
| | | KQKIIEEFGEGYFILKDGVYEWNAGKLKIKKGSSKQSSSELVDSDIL |
| | | KDSFDLASELKGEKLMLYRDPSGNVFPSDKWMAAGVFFGKLERILI |
| | | SKLTNQYSISTIEDDSSKQSMKRPAATKKAGQAKKKKGSYPYDVPD |
| | | YAYPYDVPDYAYPYDVPDYA |
| BhCas12b | 280 | GCCACCATGGCCCCAAAGAAGAAGCGGAAGGTCGGTATCCACG |
| GGSGGS-ABE8- | | GAGTCCCAGCAGCCGCCACCAGATCCTTCATCCTGAAGATCGA |
| Xten20 at D980 | | GCCCAACGAGGAAGTGAAGAAAGGCCTCTGGAAAACCCACGAG |
| polynucleotide | | GTGCTGAACCACGGAATCGCCTACTACATGAATATCCTGAAGCT |
| | | GATCCGGCAAGAGGCCATCTACGAGCACCACGAGCAGGACCCC |
| | | AAGAATCCCAAGAAGGTGTCCAAGGCCGAGATCCAGGCCGAGC |
| | | TGTGGGATTTCGTGCTGAAGATGCAGAAGTGCAACAGCTTCACA |
| | | CACGAGGTGGACAAGGACGAGGTGTTCAACATCCTGAGAGAGC |
| | | TGTACGAGGAACTGGTGCCCAGCAGCGTGGAAAAGAAGGGCGA |
| | | AGCCAACCAGCTGAGCAACAAGTTTCTGTACCCTCTGGTGGACC |
| | | CCAACAGCCAGTCTGGAAAGGGAACAGCCAGCAGCGGCAGAAA |
| | | GCCCAGATGGTACAACCTGAAGATTGCCGGCGATCCCTCCTGG |
| | | GAAGAAGAGAAGAAGAAGTGGGAAGAAGATAAGAAAAAGGACC |
| | | CGCTGGCCAAGATCCTGGGCAAGCTGGCTGAGTACGGACTGAT |
| | | CCCTCTGTTCATCCCCTACACCGACAGCAACGAGCCCATCGTGA |
| | | AAGAAATCAAGTGGATGGAAAAGTCCCGGAACCAGAGCGTGCG |
| | | GCGGCTGGATAAGGACATGTTCATTCAGGCCCTGGAACGGTTC |
| | | CTGAGCTGGGAGAGCTGGAACCTGAAAGTGAAAGAGGAATACG |
| | | AGAAGGTCGAGAAAGAGTACAAGACCCTGGAAGAGAGGATCAA |
| | | AGAGGACATCCAGGCTCTGAAGGCTCTGGAACAGTATGAGAAA |
| | | GAGCGGCAAGAACAGCTGCTGCGGGACACCCTGAACACCAACG |
| | | AGTACCGGCTGAGCAAGAGAGGCCTTAGAGGCTGGCGGGAAAT |
| | | CATCCAGAAATGGCTGAAAATGGACGAGAACGAGCCCTCCGAG |
| | | AAGTACCTGGAAGTGTTCAAGGACTACCAGCGGAAGCACCCTA |
| | | GAGAGGCCGGCGATTACAGCGTGTACGAGTTCCTGTCCAAGAA |
| | | AGAGAACCACTTCATCTGGCGGAATCACCCTGAGTACCCCTACC |
| | | TGTACGCCACCTTCTGCGAGATCGACAAGAAAAAGAAGGACGC |
| | | CAAGCAGCAGGCCACCTTCACACTGGCCGATCCTATCAATCACC |
| | | CTCTGTGGGTCCGATTCGAGGAAAGAAGCGGCAGCAACCTGAA |
| | | CAAGTACAGAATCCTGACCGAGCAGCTGCACACCGAGAAGCTG |
| | | AAGAAAAAGCTGACAGTGCAGCTGGACCGGCTGATCTACCCTAC |
| | | AGAATCTGGCGGCTGGGAAGAGAAGGGCAAAGTGGACATTGTG |
| | | CTGCTGCCCAGCCGGCAGTTCTACAACCAGATCTTCCTGGACAT |
| | | CGAGGAAAAGGGCAAGCACGCCTTCACCTACAAGGATGAGAGC |
| | | ATCAAGTTCCCTCTGAAGGGCACACTCGGCGGAGCCAGAGTGC |
| | | AGTTCGACAGAGATCACCTGAGAAGATACCCTCACAAGGTGGAA |
| | | AGCGGCAACGTGGGCAGAATCTACTTCAACATGACCGTGAACAT |
| | | CGAGCCTACAGAGTCCCCAGTGTCCAAGTCTCTGAAGATCCACC |
| | | GGGACGACTTCCCCAAGGTGGTCAACTTCAAGCCCAAAGAACT |
| | | GACCGAGTGGATCAAGGACAGCAAGGGCAAGAAACTGAAGTCC |
| | | GGCATCGAGTCCCTGGAAATCGGCCTGAGAGTGATGAGCATCG |
| | | ACCTGGGACAGAGACAGGCCGCTGCCGCCTCTATTTTCGAGGT |
| | | GGTGGATCAGAAGCCCGACATCGAAGGCAAGCTGTTTTTCCCAA |
| | | TCAAGGGCACCGAGCTGTATGCCGTGCACAGAGCCAGCTTCAA |
| | | CATCAAGCTGCCCGGCGAGACACTGGTCAAGAGCAGAGAAGTG |
| | | CTGCGGAAGGCCAGAGAGGACAATCTGAAACTGATGAACCAGA |
| | | AGCTCAACTTCCTGCGGAACGTGCTGCACTTCCAGCAGTTCGAG |
| | | GACATCACCGAGAGAGAGAAGCGGGTCACCAAGTGGATCAGCA |
| | | GACAAGAGAACAGCGACGTGCCCCTGGTGTACCAGGATGAGCT |
| | | GATCCAGATCCGCGAGCTGATGTACAAGCCTTACAAGGACTGG |
| | | GTCGCCTTCCTGAAGCAGCTCCACAAGAGACTGGAAGTCGAGA |
| | | TCGGCAAAGAAGTGAAGCACTGGCGGAAGTCCCTGAGCGACGG |
| | | AAGAAAGGGCCTGTACGGCATCTCCCTGAAGAACATCGACGAG |
| | | ATCGATCGGACCCGGAAGTTCCTGCTGAGATGGTCCCTGAGGC |
| | | CTACCGAACCTGGCGAAGTGCGTAGACTGGAACCCGGCCAGAG |
| | | ATTCGCCATCGACCAGCTGAATCACCTGAACGCCCTGAAAGAAG |
| | | ATCGGCTGAAGAAGATGGCCAACACCATCATCATGCACGCCCTG |
| | | GGCTACTGCTACGACGTGCGGAAGAAGAAATGGCAGGCTAAGA |
| | | ACCCCGCCTGCCAGATCATCCTGTTCGAGGATCTGAGCAACTAC |
| | | AACCCCTACGAGGAAAGGTCCCGCTTCGAGAACAGCAAGCTCA |
| | | TGAAGTGGTCCAGACGCGAGATCCCCAGACAGGTTGCACTGCA |
| | | GGGCGAGATCTATGGCCTGCAAGTGGGAGAAGTGGGCGCTCAG |
| | | TTCAGCAGCAGATTCCACGCCAAGACAGGCAGCCCTGGCATCA |
| | | GATGTAGCGTCGTGACCAAAGAGAAGCTGCAGGACAATCGGTT |
| | | CTTCAAGAATCTGCAGAGAGAGGGCAGACTGACCCTGGACAAA |
| | | ATCGCCGTGCTGAAAGAGGGCGATCTGTACCCAGACAAAGGCG |
| | | GCGAGAAGTTCATCAGCCTGAGCAAGGATCGGAAGTGCGTGAC |
| | | CACACACGCCGACATCAACGCCGCTCAGAACCTGCAGAAGCGG |
| | | TTCTGGACAAGAACCCACGGCTTCTACAAGGTGTACTGCAAGGC |
| | | CTACCAGGTGGACGGAGGCTCTGGAGGAAGCTCCGAAGTCGAG |
| | | TTTTCCCATGAGTACTGGATGAGACACGCATTGACTCTCGCAAA |
| | | GAGGGCTCGAGATGAACGCGAGGTGCCCGTGGGGGCAGTACT |
| | | CGTGCTCAACAATCGCGTAATCGGCGAAGGTTGGAATAGGGCA |
| | | ATCGGACTCCACGACCCCACTGCACATGCGGAAATCATGGCCC |
| | | TTCGACAGGGAGGGCTTGTGATGCAGAATTATCGACTTTATGAT |
| | | GCGACGCTGTACGTCACGTTTGAACCTTGCGTAATGTGCGCGG |
| | | GAGCTATGATTCACTCCCGCATTGGACGAGTTGTATTCGGTGTT |
| | | CGCAACGCCAAGACGGGTGCCGCAGGTTCACTGATGGACGTGC |
| | | TGCATCATCCAGGCATGAACCACCGGGTAGAAATCACAGAAGG |
| | | CATATTGGCGGACGAATGTGCGGCGCTGTTGTGTCGTTTTTTTC |
| | | GCATGCCCAGGCGGGTCTTTAACGCCCAGAAAAAAGCACAATC |
| | | CTCTACTGACGGCTCTTCTGGATCTGAAACACCTGGCACAAGCG |
| | | AGAGCGCCACCCCTGAGAGCTCTGGCGGCCAGACCGTGTACAT |
| | | CCCTGAGAGCAAGGACCAGAAGCAGAAGATCATCGAAGAGTTC |
| | | GGCGAGGGCTACTTCATTCTGAAGGACGGGGTGTACGAATGGG |
| | | TCAACGCCGGCAAGCTGAAAATCAAGAAGGGCAGCTCCAAGCA |
| | | GAGCAGCAGCGAGCTGGTGGATAGCGACATCCTGAAAGACAGC |
| | | TTCGACCTGGCCTCCGAGCTGAAAGGCGAAAAGCTGATGCTGT |
| | | ACAGGGACCCCAGCGGCAATGTGTTCCCCAGCGACAAATGGAT |
| | | GGCCGCTGGCGTGTTCTTCGGAAAGCTGGAACGCATCCTGATC |
| | | AGCAAGCTGACCAACCAGTACTCCATCAGCACCATCGAGGACG |
| | | ACAGCAGCAAGCAGTCTATGAAAAGGCCGGCGGCCACGAAAAA |
| | | GGCCGGCCAGGCAAAAAAGAAAAAGGGATCCTACCCATACGAT |
| | | GTTCCAGATTACGCTTATCCCTACGACGTGCCTGATTATGCATAC |
| | | CCATATGATGTCCCCGACTATGCCTAA |
| BhCas12b | 281 | MAPKKKRKVGIHGVPAAATRSFILKIEPNEEVKKGLWKTHEVLNHGI |
| GGSGGS-ABE8- | | AYYMNILKLIRQEAIYEHHEQDPKNPKKVSKAEIQAELWDFVLKMQK |
| Xten20 at D980 | | CNSFTHEVDKDEVFNILRELYEELVPSSVEKKGEANQLSNKFLYPLV |
| polypeptide | | DPNSQSGKGTASSGRKPRWYNLKIAGDPSWEEEKKKWEEDKKKD |
| | | PLAKILGKLAEYGLIPLFIPYTDSNEPIVKEIKWMEKSRNQSVRRLDK |
| | | DMFIQALERFLSWESWNLKVKEEYEKVEKEYKTLEERIKEDIQALKA |
| | | LEQYEKERQEQLLRDTLNTNEYRLSKRGLRGWREIIQKWLKMDEN |
| | | EPSEKYLEVFKDYQRKHPREAGDYSVYEFLSKKENHFIWRNHPEY |
| | | PYLYATFCEIDKKKKDAKQQATFTLADPINHPLWRFEERSGSNLN |
| | | KYRILTEQLHTEKLKKKLTVQLDRLIYPTESGGWEEKGKVDIVLLPS |
| | | RQFYNQIFLDIEEKGKHAFTYKDESIKFPLKGTLGGARVQFDRDHLR |
| | | RYPHKVESGNVGRIYFNMTVNIEPTESPVSKSLKIHRDDFPKVVNFK |
| | | PKELTEWIKDSKGKKLKSGIESLEIGLRVMSIDLGQRQAAAASIFEVV |
| | | DQKPDIEGKLFFPIKGTELYAVHRASFNIKLPGETLVKSREVLRKAR |
| | | EDNLKLMNQKLNFLRNVLHFQQFEDITEREKRVTKWISRQENSDVP |
| | | LVYQDELIQIRELMYKPYKDWAFLKQLHKRLEVEIGKEVKHWRKS |
| | | LSDGRKGLYGISLKNIDEIDRTRKFLLRWSLRPTEPGEVRRLEPGQR |
| | | FAIDQLNHLNALKEDRLKKMANTIIMHALGYCYDVRKKKWQAKNPA |
| | | CQIILFEDLSNYNPYEERSRFENSKLMKWSRREIPRQVALQGEIYGL |
| | | QVGEVGAQFSSRFHAKTGSPGIRCSVVTKEKLQDNRFFKNLQREG |
| | | RLTLDKIAVLKEGDLYPDKGGEKFISLSKDRKCVTTHADINAAQNLQ |
| | | KRFWTRTHGFYKVYCKAYQVDGGSGGSSEVEFSHEYWMRHALTL |
| | | AKRARDEREVPVGAVLVLNNRVIGEGWNRAIGLHDPTAHAEIMALR |
| | | QGGLVMQNYRLYDATLYVTFEPCVMCAGAMIHSRIGRVVFGVRNA |
| | | KTGAAGSLMDVLHHPGMNHRVEITEGILADECAALLCRFFRMPRRV |
| | | FNAQKKAQSSTDGSSGSETPGTSESATPESSGGQTVYIPESKDQK |
| | | QKIIEEFGEGYFILKDGVYEWNAGKLKIKKGSSKQSSSELVDSDILK |
| | | DSFDLASELKGEKLMLYRDPSGNVFPSDKWMAAGVFFGKLERILIS |
| | | KLTNQYSISTIEDDSSKQSMKRPAATKKAGQAKKKKGSYPYDVPDY |
| | | AYPYDVPDYAYPYDVPDYA |
| BhCas12b | 282 | GCCACCATGGCCCCAAAGAAGAAGCGGAAGGTCGGTATCCACG |
| GGSGGS-ABE8- | | GAGTCCCAGCAGCCGCCACCAGATCCTTCATCCTGAAGATCGA |
| Xten20 at K1019 | | GCCCAACGAGGAAGTGAAGAAAGGCCTCTGGAAAACCCACGAG |
| polynucleotide | | GTGCTGAACCACGGAATCGCCTACTACATGAATATCCTGAAGCT |
| | | GATCCGGCAAGAGGCCATCTACGAGCACCACGAGCAGGACCCC |
| | | AAGAATCCCAAGAAGGTGTCCAAGGCCGAGATCCAGGCCGAGC |
| | | TGTGGGATTTCGTGCTGAAGATGCAGAAGTGCAACAGCTTCACA |
| | | CACGAGGTGGACAAGGACGAGGTGTTCAACATCCTGAGAGAGC |
| | | TGTACGAGGAACTGGTGCCCAGCAGCGTGGAAAAGAAGGGCGA |
| | | AGCCAACCAGCTGAGCAACAAGTTTCTGTACCCTCTGGTGGACC |
| | | CCAACAGCCAGTCTGGAAAGGGAACAGCCAGCAGCGGCAGAAA |
| | | GCCCAGATGGTACAACCTGAAGATTGCCGGCGATCCCTCCTGG |
| | | GAAGAAGAGAAGAAGAAGTGGGAAGAAGATAAGAAAAAGGACC |
| | | CGCTGGCCAAGATCCTGGGCAAGCTGGCTGAGTACGGACTGAT |
| | | CCCTCTGTTCATCCCCTACACCGACAGCAACGAGCCCATCGTGA |
| | | AAGAAATCAAGTGGATGGAAAAGTCCCGGAACCAGAGCGTGCG |
| | | GCGGCTGGATAAGGACATGTTCATTCAGGCCCTGGAACGGTTC |
| | | CTGAGCTGGGAGAGCTGGAACCTGAAAGTGAAAGAGGAATACG |
| | | AGAAGGTCGAGAAAGAGTACAAGACCCTGGAAGAGAGGATCAA |
| | | AGAGGACATCCAGGCTCTGAAGGCTCTGGAACAGTATGAGAAA |
| | | GAGCGGCAAGAACAGCTGCTGCGGGACACCCTGAACACCAACG |
| | | AGTACCGGCTGAGCAAGAGAGGCCTTAGAGGCTGGCGGGAAAT |
| | | CATCCAGAAATGGCTGAAAATGGACGAGAACGAGCCCTCCGAG |
| | | AAGTACCTGGAAGTGTTCAAGGACTACCAGCGGAAGCACCCTA |
| | | GAGAGGCCGGCGATTACAGCGTGTACGAGTTCCTGTCCAAGAA |
| | | AGAGAACCACTTCATCTGGCGGAATCACCCTGAGTACCCCTACC |
| | | TGTACGCCACCTTCTGCGAGATCGACAAGAAAAAGAAGGACGC |
| | | CAAGCAGCAGGCCACCTTCACACTGGCCGATCCTATCAATCACC |
| | | CTCTGTGGGTCCGATTCGAGGAAAGAAGCGGCAGCAACCTGAA |
| | | CAAGTACAGAATCCTGACCGAGCAGCTGCACACCGAGAAGCTG |
| | | AAGAAAAAGCTGACAGTGCAGCTGGACCGGCTGATCTACCCTAC |
| | | AGAATCTGGCGGCTGGGAAGAGAAGGGCAAAGTGGACATTGTG |
| | | CTGCTGCCCAGCCGGCAGTTCTACAACCAGATCTTCCTGGACAT |
| | | CGAGGAAAAGGGCAAGCACGCCTTCACCTACAAGGATGAGAGC |
| | | ATCAAGTTCCCTCTGAAGGGCACACTCGGCGGAGCCAGAGTGC |
| | | AGTTCGACAGAGATCACCTGAGAAGATACCCTCACAAGGTGGAA |
| | | AGCGGCAACGTGGGCAGAATCTACTTCAACATGACCGTGAACAT |
| | | CGAGCCTACAGAGTCCCCAGTGTCCAAGTCTCTGAAGATCCACC |
| | | GGGACGACTTCCCCAAGGTGGTCAACTTCAAGCCCAAAGAACT |
| | | GACCGAGTGGATCAAGGACAGCAAGGGCAAGAAACTGAAGTCC |
| | | GGCATCGAGTCCCTGGAAATCGGCCTGAGAGTGATGAGCATCG |
| | | ACCTGGGACAGAGACAGGCCGCTGCCGCCTCTATTTTCGAGGT |
| | | GGTGGATCAGAAGCCCGACATCGAAGGCAAGCTGTTTTTCCCAA |
| | | TCAAGGGCACCGAGCTGTATGCCGTGCACAGAGCCAGCTTCAA |
| | | CATCAAGCTGCCCGGCGAGACACTGGTCAAGAGCAGAGAAGTG |
| | | CTGCGGAAGGCCAGAGAGGACAATCTGAAACTGATGAACCAGA |
| | | AGCTCAACTTCCTGCGGAACGTGCTGCACTTCCAGCAGTTCGAG |
| | | GACATCACCGAGAGAGAGAAGCGGGTCACCAAGTGGATCAGCA |
| | | GACAAGAGAACAGCGACGTGCCCCTGGTGTACCAGGATGAGCT |
| | | GATCCAGATCCGCGAGCTGATGTACAAGCCTTACAAGGACTGG |
| | | GTCGCCTTCCTGAAGCAGCTCCACAAGAGACTGGAAGTCGAGA |
| | | TCGGCAAAGAAGTGAAGCACTGGCGGAAGTCCCTGAGCGACGG |
| | | AAGAAAGGGCCTGTACGGCATCTCCCTGAAGAACATCGACGAG |
| | | ATCGATCGGACCCGGAAGTTCCTGCTGAGATGGTCCCTGAGGC |
| | | CTACCGAACCTGGCGAAGTGCGTAGACTGGAACCCGGCCAGAG |
| | | ATTCGCCATCGACCAGCTGAATCACCTGAACGCCCTGAAAGAAG |
| | | ATCGGCTGAAGAAGATGGCCAACACCATCATCATGCACGCCCTG |
| | | GGCTACTGCTACGACGTGCGGAAGAAGAAATGGCAGGCTAAGA |
| | | ACCCCGCCTGCCAGATCATCCTGTTCGAGGATCTGAGCAACTAC |
| | | AACCCCTACGAGGAAAGGTCCCGCTTCGAGAACAGCAAGCTCA |
| | | TGAAGTGGTCCAGACGCGAGATCCCCAGACAGGTTGCACTGCA |
| | | GGGCGAGATCTATGGCCTGCAAGTGGGAGAAGTGGGCGCTCAG |
| | | TTCAGCAGCAGATTCCACGCCAAGACAGGCAGCCCTGGCATCA |
| | | GATGTAGCGTCGTGACCAAAGAGAAGCTGCAGGACAATCGGTT |
| | | CTTCAAGAATCTGCAGAGAGAGGGCAGACTGACCCTGGACAAA |
| | | ATCGCCGTGCTGAAAGAGGGCGATCTGTACCCAGACAAAGGCG |
| | | GCGAGAAGTTCATCAGCCTGAGCAAGGATCGGAAGTGCGTGAC |
| | | CACACACGCCGACATCAACGCCGCTCAGAACCTGCAGAAGCGG |
| | | TTCTGGACAAGAACCCACGGCTTCTACAAGGTGTACTGCAAGGC |
| | | CTACCAGGTGGACGGCCAGACCGTGTACATCCCTGAGAGCAAG |
| | | GACCAGAAGCAGAAGATCATCGAAGAGTTCGGCGAGGGCTACT |
| | | TCATTCTGAAGGACGGGGTGTACGAATGGGTCAACGCCGGCAA |
| | | GGGAGGCTCTGGAGGAAGCTCCGAAGTCGAGTTTTCCCATGAG |
| | | TACTGGATGAGACACGCATTGACTCTCGCAAAGAGGGCTCGAG |
| | | ATGAACGCGAGGTGCCCGTGGGGGCAGTACTCGTGCTCAACAA |
| | | TCGCGTAATCGGCGAAGGTTGGAATAGGGCAATCGGACTCCAC |
| | | GACCCCACTGCACATGCGGAAATCATGGCCCTTCGACAGGGAG |
| | | GGCTTGTGATGCAGAATTATCGACTTTATGATGCGACGCTGTAC |
| | | GTCACGTTTGAACCTTGCGTAATGTGCGCGGGAGCTATGATTCA |
| | | CTCCCGCATTGGACGAGTTGTATTCGGTGTTCGCAACGCCAAGA |
| | | CGGGTGCCGCAGGTTCACTGATGGACGTGCTGCATCATCCAGG |
| | | CATGAACCACCGGGTAGAAATCACAGAAGGCATATTGGCGGAC |
| | | GAATGTGCGGCGCTGTTGTGTCGTTTTTTTCGCATGCCCAGGCG |
| | | GGTCTTTAACGCCCAGAAAAAAGCACAATCCTCTACTGACGGCT |
| | | CTTCTGGATCTGAAACACCTGGCACAAGCGAGAGCGCCACCCC |
| | | TGAGAGCTCTGGCCTGAAAATCAAGAAGGGCAGCTCCAAGCAG |
| | | AGCAGCAGCGAGCTGGTGGATAGCGACATCCTGAAAGACAGCT |
| | | TCGACCTGGCCTCCGAGCTGAAAGGCGAAAAGCTGATGCTGTA |
| | | CAGGGACCCCAGCGGCAATGTGTTCCCCAGCGACAAATGGATG |
| | | GCCGCTGGCGTGTTCTTCGGAAAGCTGGAACGCATCCTGATCA |
| | | GCAAGCTGACCAACCAGTACTCCATCAGCACCATCGAGGACGA |
| | | CAGCAGCAAGCAGTCTATGAAAAGGCCGGCGGCCACGAAAAAG |
| | | GCCGGCCAGGCAAAAAAGAAAAAGGGATCCTACCCATACGATG |
| | | TTCCAGATTACGCTTATCCCTACGACGTGCCTGATTATGCATACC |
| | | CATATGATGTCCCCGACTATGCCTAA |
| BhCas12b | 283 | MAPKKKRKVGIHGVPAAATRSFILKIEPNEEVKKGLWKTHEVLNHGI |
| GGSGGS-ABE8- | | AYYMNILKLIRQEAIYEHHEQDPKNPKKVSKAEIQAELWDFVLKMQK |
| Xten20 at K1019 | | CNSFTHEVDKDEVFNILRELYEELVPSSVEKKGEANQLSNKFLYPLV |
| polypeptide | | DPNSQSGKGTASSGRKPRWYNLKIAGDPSWEEEKKKWEEDKKKD |
| | | PLAKILGKLAEYGLIPLFIPYTDSNEPIVKEIKWMEKSRNQSVRRLDK |
| | | DMFIQALERFLSWESWNLKVKEEYEKVEKEYKTLEERIKEDIQALKA |
| | | LEQYEKERQEQLLRDTLNTNEYRLSKRGLRGWREIIQKWLKMDEN |
| | | EPSEKYLEVFKDYQRKHPREAGDYSVYEFLSKKENHFIWRNHPEY |
| | | PYLYATFCEIDKKKKDAKQQATFTLADPINHPLWRFEERSGSNLN |
| | | KYRILTEQLHTEKLKKKLTVQLDRLIYPTESGGWEEKGKVDIVLLPS |
| | | RQFYNQIFLDIEEKGKHAFTYKDESIKFPLKGTLGGARVQFDRDHLR |
| | | RYPHKVESGNVGRIYFNMTVNIEPTESPVSKSLKIHRDDFPKVVNFK |
| | | PKELTEWIKDSKGKKLKSGIESLEIGLRVMSIDLGQRQAAAASIFEVV |
| | | DQKPDIEGKLFFPIKGTELYAVHRASFNIKLPGETLVKSREVLRKAR |
| | | EDNLKLMNQKLNFLRNVLHFQQFEDITEREKRVTKWISRQENSDVP |
| | | LVYQDELIQIRELMYKPYKDWAFLKQLHKRLEVEIGKEVKHWRKS |
| | | LSDGRKGLYGISLKNIDEIDRTRKFLLRWSLRPTEPGEVRRLEPGQR |
| | | FAIDQLNHLNALKEDRLKKMANTIIMHALGYCYDVRKKKWQAKNPA |
| | | CQIILFEDLSNYNPYEERSRFENSKLMKWSRREIPRQVALQGEIYGL |
| | | QVGEVGAQFSSRFHAKTGSPGIRCSVVTKEKLQDNRFFKNLQREG |
| | | RLTLDKIAVLKEGDLYPDKGGEKFISLSKDRKCVTTHADINAAQNLQ |
| | | KRFWTRTHGFYKVYCKAYQVDGQTVYIPESKDQKQKIIEEFGEGYF |
| | | ILKDGVYEWNAGKGGSGGSSEVEFSHEYWMRHALTLAKRARDE |
| | | REVPVGAVLVLNNRVIGEGWNRAIGLHDPTAHAEIMALRQGGLVM |
| | | QNYRLYDATLYVTFEPCVMCAGAMIHSRIGRVVFGVRNAKTGAAG |
| | | SLMDVLHHPGMNHRVEITEGILADECAALLCRFFRMPRRVFNAQKK |
| | | AQSSTDGSSGSETPGTSESATPESSGLKIKKGSSKQSSSELVDSDI |
| | | LKDSFDLASELKGEKLMLYRDPSGNVFPSDKWMAAGVFFGKLERIL |
| | | ISKLTNQYSISTIEDDSSKQSMKRPAATKKAGQAKKKKGSYPYDVP |
| | | DYAYPYDVPDYAYPYDVPDYA |
| tr\|A5H718\|A5H718_ | 41 | MTDAEYVRIHEKLDIYTFKKQFFNNKKSVSHRCYVLFELKRRGERR |
| PETMA Cytosine | | ACFWGYAVNKPQSGTERGIHAEIFSIRKVEEYLRDNPGQFTINWYS |
| deaminase | | SWSPCADCAEKILEWYNQELRGNGHTLKIWACKLYYEKNARNQIG |
| OS = Petromyzon | | LWNLRDNGVGLNVMVSEHYQCCRKIFIQSSHNQLNENRWLEKTLK |
| marinus OX = 7757 | | RAEKRRSELSIMIQVKILHTTKSPAV |
| PE = 2 SV = 1 | | |
| amino acid | | |
| sequence; | | |
| PmCDA1 amino | | |
| acid sequence | | |
| EF094822.1 | 42 | TGACACGACACAGCCGTGTATATGAGGAAGGGTAGCTGGATGG |
| Petromyzon | | GGGGGGGGGGAATACGTTCAGAGAGGACATTAGCGAGCGTCTT |
| marinus isolate | | GTTGGTGGCCTTGAGTCTAGACACCTGCAGACATGACCGACGC |
| PmCDA.21 | | TGAGTACGTGAGAATCCATGAGAAGTTGGACATCTACACGTTTA |
| cytosine | | AGAAACAGTTTTTCAACAACAAAAAATCCGTGTCGCATAGATGCT |
| deaminase mRNA, | | ACGTTCTCTTTGAATTAAAACGACGGGGTGAACGTAGAGCGTGT |
| complete cds; | | TTTTGGGGCTATGCTGTGAATAAACCACAGAGCGGGACAGAACG |
| PmCDA1 amino | | TGGAATTCACGCCGAAATCTTTAGCATTAGAAAAGTCGAAGAATA |
| acid sequence | | CCTGCGCGACAACCCCGGACAATTCACGATAAATTGGTACTCAT |
| | | CCTGGAGTCCTTGTGCAGATTGCGCTGAAAAGATCTTAGAATGG |
| | | TATAACCAGGAGCTGCGGGGGAACGGCCACACTTTGAAAATCT |
| | | GGGCTTGCAAACTCTATTACGAGAAAAATGCGAGGAATCAAATT |
| | | GGGCTGTGGAACCTCAGAGATAACGGGGTTGGGTTGAATGTAA |
| | | TGGTAAGTGAACACTACCAATGTTGCAGGAAAATATTCATCCAAT |
| | | CGTCGCACAATCAATTGAATGAGAATAGATGGCTTGAGAAGACT |
| | | TTGAAGCGAGCTGAAAAACGACGGAGCGAGTTGTCCATTATGAT |
| | | TCAGGTAAAAATACTCCACACCACTAAGAGTCCTGCTGTTTAAGA |
| | | GGCTATGCGGATGGTTTTC |
| tr\|Q6QJ80\|Q6QJ80_ | 43 | MDSLLMNRRKFLYQFKNVRWAKGRRETYLCYVVKRRDSATSFSLD |
| HUMAN | | FGYLRNKNGCHVELLFLRYISDWDLDPGRCYRVTWFTSWSPCYDC |
| Activation-induced | | ARHVADFLRGNPNLSLRIFTARLYFCEDRKAEPEGLRRLHRAGVQI |
| cytidine deaminase | | AIMTFKAPV |
| OS = Homo sapiens | | |
| OX = 9606 | | |
| GN = AICDA PE = 2 | | |
| SV = 1; AID amino | | |
| acid sequence | | |
| NG_011588.1: | 44 | AGAGAACCATCATTAATTGAAGTGAGATTTTTCTGGCCTGAGACT |
| 5001-15681 Homo | | TGCAGGGAGGCAAGAAGACACTCTGGACACCACTATGGACAGG |
| sapiens activation | | TAAAGAGGCAGTCTTCTCGTGGGTGATTGCACTGGCCTTCCTCT |
| induced cytidine | | CAGAGCAAATCTGAGTAATGAGACTGGTAGCTATCCCTTTCTCT |
| deaminase | | CATGTAACTGTCTGACTGATAAGATCAGCTTGATCAATATGCATA |
| (AICDA), | | TATATTTTTTGATCTGTCTCCTTTTCTTCTATTCAGATCTTATACG |
| RefSeqGene | | CTGTCAGCCCAATTCTTTCTGTTTCAGACTTCTCTTGATTTCCCT |
| (LRG_17) on | | CTTTTTCATGTGGCAAAAGAAGTAGTGCGTACAATGTACTGATTC |
| chromosome 12; | | GTCCTGAGATTTGTACCATGGTTGAAACTAATTTATGGTAATAAT |
| nucleic acid | | ATTAACATAGCAAATCTTTAGAGACTCAAATCATGAAAAGGTAAT |
| sequence of the | | AGCAGTACTGTACTAAAAACGGTAGTGCTAATTTTCGTAATAATT |
| CDS of human AID | | TTGTAAATATTCAACAGTAAAACAACTTGAAGACACACTTTCCTA |
| | | GGGAGGCGTTACTGAAATAATTTAGCTATAGTAAGAAAATTTGTA |
| | | ATTTTAGAAATGCCAAGCATTCTAAATTAATTGCTTGAAAGTCACT |
| | | ATGATTGTGTCCATTATAAGGAGACAAATTCATTCAAGCAAGTTA |
| | | TTTAATGTTAAAGGCCCAATTGTTAGGCAGTTAATGGCACTTTTA |
| | | CTATTAACTAATCTTTCCATTTGTTCAGACGTAGCTTAACTTACCT |
| | | CTTAGGTGTGAATTTGGTTAAGGTCCTCATAATGTCTTTATGTGC |
| | | AGTTTTTGATAGGTTATTGTCATAGAACTTATTCTATTCCTACATT |
| | | TATGATTACTATGGATGTATGAGAATAACACCTAATCCTTATACTT |
| | | TACCTCAATTTAACTCCTTTATAAAGAACTTACATTACAGAATAAA |
| | | GATTTTTTAAAAATATATTTTTTTGTAGAGACAGGGTCTTAGCCCA |
| | | GCCGAGGCTGGTCTCTAAGTCCTGGCCCAAGCGATCCTCCTGC |
| | | CTGGGCCTCCTAAAGTGCTGGAATTATAGACATGAGCCATCACA |
| | | TCCAATATACAGAATAAAGATTTTTAATGGAGGATTTAATGTTCTT |
| | | CAGAAAATTTTCTTGAGGTCAGACAATGTCAAATGTCTCCTCAGT |
| | | TTACACTGAGATTTTGAAAACAAGTCTGAGCTATAGGTCCTTGTG |
| | | AAGGGTCCATTGGAAATACTTGTTCAAAGTAAAATGGAAAGCAAA |
| | | GGTAAAATCAGCAGTTGAAATTCAGAGAAAGACAGAAAAGGAGA |
| | | AAAGATGAAATTCAACAGGACAGAAGGGAAATATATTATCATTAA |
| | | GGAGGACAGTATCTGTAGAGCTCATTAGTGATGGCAAAATGACT |
| | | TGGTCAGGATTATTTTTAACCCGCTTGTTTCTGGTTTGCACGGCT |
| | | GGGGATGCAGCTAGGGTTCTGCCTCAGGGAGCACAGCTGTCCA |
| | | GAGCAGCTGTCAGCCTGCAAGCCTGAAACACTCCCTCGGTAAA |
| | | GTCCTTCCTACTCAGGACAGAAATGACGAGAACAGGGAGCTGG |
| | | AAACAGGCCCCTAACCAGAGAAGGGAAGTAATGGATCAACAAAG |
| | | TTAACTAGCAGGTCAGGATCACGCAATTCATTTCACTCTGACTG |
| | | GTAACATGTGACAGAAACAGTGTAGGCTTATTGTATTTTCATGTA |
| | | GAGTAGGACCCAAAAATCCACCCAAAGTCCTTTATCTATGCCAC |
| | | ATCCTTCTTATCTATACTTCCAGGACACTTTTTCTTCCTTATGATA |
| | | AGGCTCTCTCTCTCTCCACACACACACACACACACACACACACA |
| | | CACACACACACACACACAAACACACACCCCGCCAACCAAGGTG |
| | | CATGTAAAAAGATGTAGATTCCTCTGCCTTTCTCATCTACACAGC |
| | | CCAGGAGGGTAAGTTAATATAAGAGGGATTTATTGGTAAGAGAT |
| | | GATGCTTAATCTGTTTAACACTGGGCCTCAAAGAGAGAATTTCTT |
| | | TTCTTCTGTACTTATTAAGCACCTATTATGTGTTGAGCTTATATAT |
| | | ACAAAGGGTTATTATATGCTAATATAGTAATAGTAATGGTGGTTG |
| | | GTACTATGGTAATTACCATAAAAATTATTATCCTTTTAAAATAAAG |
| | | CTAATTATTATTGGATCTTTTTTAGTATTCATTTTATGTTTTTTATG |
| | | TTTTTGATTTTTTAAAAGACAATCTCACCCTGTTACCCAGGCTGG |
| | | AGTGCAGTGGTGCAATCATAGCTTTCTGCAGTCTTGAACTCCTG |
| | | GGCTCAAGCAATCCTCCTGCCTTGGCCTCCCAAAGTGTTGGGAT |
| | | ACAGTCATGAGCCACTGCATCTGGCCTAGGATCCATTTAGATTA |
| | | AAATATGCATTTTAAATTTTAAAATAATATGGCTAATTTTTACCTTA |
| | | TGTAATGTGTATACTGGCAATAAATCTAGTTTGCTGCCTAAAGTT |
| | | TAAAGTGCTTTCCAGTAAGCTTCATGTACGTGAGGGGAGACATT |
| | | TAAAGTGAAACAGACAGCCAGGTGTGGTGGCTCACGCCTGTAAT |
| | | CCCAGCACTCTGGGAGGCTGAGGTGGGTGGATCGCTTGAGCCC |
| | | TGGAGTTCAAGACCAGCCTGAGCAACATGGCAAAACGCTGTTTC |
| | | TATAACAAAAATTAGCCGGGCATGGTGGCATGTGCCTGTGGTCC |
| | | CAGCTACTAGGGGGCTGAGGCAGGAGAATCGTTGGAGCCCAGG |
| | | AGGTCAAGGCTGCACTGAGCAGTGCTTGCGCCACTGCACTCCA |
| | | GCCTGGGTGACAGGACCAGACCTTGCCTCAAAAAAATAAGAAGA |
| | | AAAATTAAAAATAAATGGAAACAACTACAAAGAGCTGTTGTCCTA |
| | | GATGAGCTACTTAGTTAGGCTGATATTTTGGTATTTAACTTTTAAA |
| | | GTCAGGGTCTGTCACCTGCACTACATTATTAAAATATCAATTCTC |
| | | AATGTATATCCACACAAAGACTGGTACGTGAATGTTCATAGTACC |
| | | TTTATTCACAAAACCCCAAAGTAGAGACTATCCAAATATCCATCA |
| | | ACAAGTGAACAAATAAACAAAATGTGCTATATCCATGCAATGGAA |
| | | TACCACCCTGCAGTACAAAGAAGCTACTTGGGGATGAATCCCAA |
| | | AGTCATGACGCTAAATGAAAGAGTCAGACATGAAGGAGGAGATA |
| | | ATGTATGCCATACGAAATTCTAGAAAATGAAAGTAACTTATAGTT |
| | | ACAGAAAGCAAATCAGGGCAGGCATAGAGGCTCACACCTGTAAT |
| | | CCCAGCACTTTGAGAGGCCACGTGGGAAGATTGCTAGAACTCA |
| | | GGAGTTCAAGACCAGCCTGGGCAACACAGTGAAACTCCATTCTC |
| | | CACAAAAATGGGAAAAAAAGAAAGCAAATCAGTGGTTGTCCTGT |
| | | GGGGAGGGGAAGGACTGCAAAGAGGGAAGAAGCTCTGGTGGG |
| | | GTGAGGGTGGTGATTCAGGTTCTGTATCCTGACTGTGGTAGCAG |
| | | TTTGGGGTGTTTACATCCAAAAATATTCGTAGAATTATGCATCTT |
| | | AAATGGGTGGAGTTTACTGTATGTAAATTATACCTCAATGTAAGA |
| | | AAAAATAATGTGTAAGAAAACTTTCAATTCTCTTGCCAGCAAACG |
| | | TTATTCAAATTCCTGAGCCCTTTACTTCGCAAATTCTCTGCACTT |
| | | CTGCCCCGTACCATTAGGTGACAGCACTAGCTCCACAAATTGGA |
| | | TAAATGCATTTCTGGAAAAGACTAGGGACAAAATCCAGGCATCA |
| | | CTTGTGCTTTCATATCAACCATGCTGTACAGCTTGTGTTGCTGTC |
| | | TGCAGCTGCAATGGGGACTCTTGATTTCTTTAAGGAAACTTGGG |
| | | TTACCAGAGTATTTCCACAAATGCTATTCAAATTAGTGCTTATGAT |
| | | ATGCAAGACACTGTGCTAGGAGCCAGAAAACAAAGAGGAGGAG |
| | | AAATCAGTCATTATGTGGGAACAACATAGCAAGATATTTAGATCA |
| | | TTTTGACTAGTTAAAAAAGCAGCAGAGTACAAAATCACACATGCA |
| | | ATCAGTATAATCCAAATCATGTAAATATGTGCCTGTAGAAAGACT |
| | | AGAGGAATAAACACAAGAATCTTAACAGTCATTGTCATTAGACAC |
| | | TAAGTCTAATTATTATTATTAGACACTATGATATTTGAGATTTAAA |
| | | AAATCTTTAATATTTTAAAATTTAGAGCTCTTCTATTTTTCCATAGT |
| | | ATTCAAGTTTGACAATGATCAAGTATTACTCTTTCTTTTTTTTTTTT |
| | | TTTTTTTTTTTTTGAGATGGAGTTTTGGTCTTGTTGCCCATGCTG |
| | | GAGTGGAATGGCATGACCATAGCTCACTGCAACCTCCACCTCCT |
| | | GGGTTCAAGCAAAGCTGTCGCCTCAGCCTCCCGGGTAGATGGG |
| | | ATTACAGGCGCCCACCACCACACTCGGCTAATGTTTGTATTTTTA |
| | | GTAGAGATGGGGTTTCACCATGTTGGCCAGGCTGGTCTCAAACT |
| | | CCTGACCTCAGAGGATCCACCTGCCTCAGCCTCCCAAAGTGCT |
| | | GGGATTACAGATGTAGGCCACTGCGCCCGGCCAAGTATTGCTC |
| | | TTATACATTAAAAAACAGGTGTGAGCCACTGCGCCCAGCCAGGT |
| | | ATTGCTCTTATACATTAAAAAATAGGCCGGTGCAGTGGCTCACG |
| | | CCTGTAATCCCAGCACTTTGGGAAGCCAAGGCGGGCAGAACAC |
| | | CCGAGGTCAGGAGTCCAAGGCCAGCCTGGCCAAGATGGTGAAA |
| | | CCCCGTCTCTATTAAAAATACAAACATTACCTGGGCATGATGGTG |
| | | GGCGCCTGTAATCCCAGCTACTCAGGAGGCTGAGGCAGGAGGA |
| | | TCCGCGGAGCCTGGCAGATCTGCCTGAGCCTGGGAGGTTGAGG |
| | | CTACAGTAAGCCAAGATCATGCCAGTATACTTCAGCCTGGGCGA |
| | | CAAAGTGAGACCGTAACAAAAAAAAAAAAATTTAAAAAAAGAAAT |
| | | TTAGATCAAGATCCAACTGTAAAAAGTGGCCTAAACACCACATTA |
| | | AAGAGTTTGGAGTTTATTCTGCAGGCAGAAGAGAACCATCAGGG |
| | | GGTCTTCAGCATGGGAATGGCATGGTGCACCTGGTTTTTGTGAG |
| | | ATCATGGTGGTGACAGTGTGGGGAATGTTATTTTGGAGGGACTG |
| | | GAGGCAGACAGACCGGTTAAAAGGCCAGCACAACAGATAAGGA |
| | | GGAAGAAGATGAGGGCTTGGACCGAAGCAGAGAAGAGCAAACA |
| | | GGGAAGGTACAAATTCAAGAAATATTGGGGGGTTTGAATCAACA |
| | | CATTTAGATGATTAATTAAATATGAGGACTGAGGAATAAGAAATG |
| | | AGTCAAGGATGGTTCCAGGCTGCTAGGCTGCTTACCTGAGGTG |
| | | GCAAAGTCGGGAGGAGTGGCAGTTTAGGACAGGGGGCAGTTGA |
| | | GGAATATTGTTTTGATCATTTTGAGTTTGAGGTACAAGTTGGACA |
| | | CTTAGGTAAAGACTGGAGGGGAAATCTGAATATACAATTATGGG |
| | | ACTGAGGAACAAGTTTATTTTATTTTTTGTTTCGTTTTCTTGTTGA |
| | | AGAACAAATTTAATTGTAATCCCAAGTCATCAGCATCTAGAAGAC |
| | | AGTGGCAGGAGGTGACTGTCTTGTGGGTAAGGGTTTGGGGTCC |
| | | TTGATGAGTATCTCTCAATTGGCCTTAAATATAAGCAGGAAAAGG |
| | | AGTTTATGATGGATTCCAGGCTCAGCAGGGCTCAGGAGGGCTC |
| | | AGGCAGCCAGCAGAGGAAGTCAGAGCATCTTCTTTGGTTTAGCC |
| | | CAAGTAATGACTTCCTTAAAAAGCTGAAGGAAAATCCAGAGTGA |
| | | CCAGATTATAAACTGTACTCTTGCATTTTCTCTCCCTCCTCTCAC |
| | | CCACAGCCTCTTGATGAACCGGAGGAAGTTTCTTTACCAATTCA |
| | | AAAATGTCCGCTGGGCTAAGGGTCGGCGTGAGACCTACCTGTG |
| | | CTACGTAGTGAAGAGGCGTGACAGTGCTACATCCTTTTCACTGG |
| | | ACTTTGGTTATCTTCGCAATAAGGTATCAATTAAAGTCGGCTTTG |
| | | CAAGCAGTTTAATGGTCAACTGTGAGTGCTTTTAGAGCCACCTG |
| | | CTGATGGTATTACTTCCATCCTTTTTTGGCATTTGTGTCTCTATCA |
| | | CATTCCTCAAATCCTTTTTTTTATTTCTTTTTCCATGTCCATGCAC |
| | | CCATATTAGACATGGCCCAAAATATGTGATTTAATTCCTCCCCAG |
| | | TAATGCTGGGCACCCTAATACCACTCCTTCCTTCAGTGCCAAGA |
| | | ACAACTGCTCCCAAACTGTTTACCAGCTTTCCTCAGCATCTGAAT |
| | | TGCCTTTGAGATTAATTAAGCTAAAAGCATTTTTATATGGGAGAA |
| | | TATTATCAGCTTGTCCAAGCAAAAATTTTAAATGTGAAAAACAAAT |
| | | TGTGTCTTAAGCATTTTTGAAAATTAAGGAAGAAGAATTTGGGAA |
| | | AAAATTAACGGTGGCTCAATTCTGTCTTCCAAATGATTTCTTTTC |
| | | CCTCCTACTCACATGGGTCGTAGGCCAGTGAATACATTCAACAT |
| | | GGTGATCCCCAGAAAACTCAGAGAAGCCTCGGCTGATGATTAAT |
| | | TAAATTGATCTTTCGGCTACCCGAGAGAATTACATTTCCAAGAGA |
| | | CTTCTTCACCAAAATCCAGATGGGTTTACATAAACTTCTGCCCAC |
| | | GGGTATCTCCTCTCTCCTAACACGCTGTGACGTCTGGGCTTGGT |
| | | GGAATCTCAGGGAAGCATCCGTGGGGTGGAAGGTCATCGTCTG |
| | | GCTCGTTGTTTGATGGTTATATTACCATGCAATTTTCTTTGCCTA |
| | | CATTTGTATTGAATACATCCCAATCTCCTTCCTATTCGGTGACAT |
| | | GACACATTCTATTTCAGAAGGCTTTGATTTTATCAAGCACTTTCAT |
| | | TTACTTCTCATGGCAGTGCCTATTACTTCTCTTACAATACCCATC |
| | | TGTCTGCTTTACCAAAATCTATTTCCCCTTTTCAGATCCTCCCAA |
| | | ATGGTCCTCATAAACTGTCCTGCCTCCACCTAGTGGTCCAGGTA |
| | | TATTTCCACAATGTTACATCAACAGGCACTTCTAGCCATTTTCCT |
| | | TCTCAAAAGGTGCAAAAAGCAACTTCATAAACACAAATTAAATCT |
| | | TCGGTGAGGTAGTGTGATGCTGCTTCCTCCCAACTCAGCGCACT |
| | | TCGTCTTCCTCATTCCACAAAAACCCATAGCCTTCCTTCACTCTG |
| | | CAGGACTAGTGCTGCCAAGGGTTCAGCTCTACCTACTGGTGTGC |
| | | TCTTTTGAGCAAGTTGCTTAGCCTCTCTGTAACACAAGGACAATA |
| | | GCTGCAAGCATCCCCAAAGATCATTGCAGGAGACAATGACTAAG |
| | | GCTACCAGAGCCGCAATAAAAGTCAGTGAATTTTAGCGTGGTCC |
| | | TCTCTGTCTCTCCAGAACGGCTGCCACGTGGAATTGCTCTTCCT |
| | | CCGCTACATCTCGGACTGGGACCTAGACCCTGGCCGCTGCTAC |
| | | CGCGTCACCTGGTTCACCTCCTGGAGCCCCTGCTACGACTGTG |
| | | CCCGACATGTGGCCGACTTTCTGCGAGGGAACCCCAACCTCAG |
| | | TCTGAGGATCTTCACCGCGCGCCTCTACTTCTGTGAGGACCGCA |
| | | AGGCTGAGCCCGAGGGGCTGCGGCGGCTGCACCGCGCCGGG |
| | | GTGCAAATAGCCATCATGACCTTCAAAGGTGCGAAAGGGCCTTC |
| | | CGCGCAGGCGCAGTGCAGCAGCCCGCATTCGGGATTGCGATG |
| | | CGGAATGAATGAGTTAGTGGGGAAGCTCGAGGGGAAGAAGTGG |
| | | GCGGGGATTCTGGTTCACCTCTGGAGCCGAAATTAAAGATTAGA |
| | | AGCAGAGAAAAGAGTGAATGGCTCAGAGACAAGGCCCCGAGGA |
| | | AATGAGAAAATGGGGCCAGGGTTGCTTCTTTCCCCTCGATTTGG |
| | | AACCTGAACTGTCTTCTACCCCCATATCCCCGCCTTTTTTTCCTT |
| | | TTTTTTTTTTTGAAGATTATTTTTACTGCTGGAATACTTTTGTAGAA |
| | | AACCACGAAAGAACTTTCAAAGCCTGGGAAGGGCTGCATGAAAA |
| | | TTCAGTTCGTCTCTCCAGACAGCTTCGGCGCATCCTTTTGGTAA |
| | | GGGGCTTCCTCGCTTTTTAAATTTTCTTTCTTTCTCTACAGTCTTT |
| | | TTTGGAGTTTCGTATATTTCTTATATTTTCTTATTGTTCAATCACTC |
| | | TCAGTTTTCATCTGATGAAAACTTTATTTCTCCTCCACATCAGCTT |
| | | TTTCTTCTGCTGTTTCACCATTCAGAGCCCTCTGCTAAGGTTCCT |
| | | TTTCCCTCCCTTTTCTTTCTTTTGTTGTTTCACATCTTTAAATTTCT |
| | | GTCTCTCCCCAGGGTTGCGTTTCCTTCCTGGTCAGAATTCTTTTC |
| | | TCCTTTTTTTTTTTTTTTTTTTTTTTTTTTAAACAAACAAACAAAAAA |
| | | CCCAAAAAAACTCTTTCCCAATTTACTTTCTTCCAACATGTTACAA |
| | | AGCCATCCACTCAGTTTAGAAGACTCTCCGGCCCCACCGACCCC |
| | | CAACCTCGTTTTGAAGCCATTCACTCAATTTGCTTCTCTCTTTCT |
| | | CTACAGCCCCTGTATGAGGTTGATGACTTACGAGACGCATTTCG |
| | | TACTTTGGGACTTTGATAGCAACTTCCAGGAATGTCACACACGAT |
| | | GAAATATCTCTGCTGAAGACAGTGGATAAAAAACAGTCCTTCAA |
| | | GTCTTCTCTGTTTTTATTCTTCAACTCTCACTTTCTTAGAGTTTAC |
| | | AGAAAAAATATTTATATACGACTCTTTAAAAAGATCTATGTCTTGA |
| | | AAATAGAGAAGGAACACAGGTCTGGCCAGGGACGTGCTGCAAT |
| | | TGGTGCAGTTTTGAATGCAACATTGTCCCCTACTGGGAATAACA |
| | | GAACTGCAGGACCTGGGAGCATCCTAAAGTGTCAACGTTTTTCT |
| | | ATGACTTTTAGGTAGGATGAGAGCAGAAGGTAGATCCTAAAAAG |
| | | CATGGTGAGAGGATCAAATGTTTTTATATCAACATCCTTTATTATT |
| | | TGATTCATTTGAGTTAACAGTGGTGTTAGTGATAGATTTTTCTATT |
| | | CTTTTCCCTTGACGTTTACTTTCAAGTAACACAAACTCTTCCATCA |
| | | GGCCATGATCTATAGGACCTCCTAATGAGAGTATCTGGGTGATT |
| | | GTGACCCCAAACCATCTCTCCAAAGCATTAATATCCAATCATGCG |
| | | CTGTATGTTTTAATCAGCAGAAGCATGTTTTTATGTTTGTACAAAA |
| | | GAAGATTGTTATGGGTGGGGATGGAGGTATAGACCATGCATGGT |
| | | CACCTTCAAGCTACTTTAATAAAGGATCTTAAAATGGGCAGGAG |
| | | GACTGTGAACAAGACACCCTAATAATGGGTTGATGTCTGAAGTA |
| | | GCAAATCTTCTGGAAACGCAAACTCTTTTAAGGAAGTCCCTAATT |
| | | TAGAAACACCCACAAACTTCACATATCATAATTAGCAAACAATTG |
| | | GAAGGAAGTTGCTTGAATGTTGGGGAGAGGAAAATCTATTGGCT |
| | | CTCGTGGGTCTCTTCATCTCAGAAATGCCAATCAGGTCAAGGTT |
| | | TGCTACATTTTGTATGTGTGTGATGCTTCTCCCAAAGGTATATTA |
| | | ACTATATAAGAGAGTTGTGACAAAACAGAATGATAAAGCTGCGA |
| | | ACCGTGGCACACGCTCATAGTTCTAGCTGCTTGGGAGGTTGAG |
| | | GAGGGAGGATGGCTTGAACACAGGTGTTCAAGGCCAGCCTGGG |
| | | CAACATAACAAGATCCTGTCTCTCAAAAAAAAAAAAAAAAAAAAG |
| | | AAAGAGAGAGGGCCGGGCGTGGTGGCTCACGCCTGTAATCCCA |
| | | GCACTTTGGGAGGCCGAGCCGGGCGGATCACCTGTGGTCAGG |
| | | AGTTTGAGACCAGCCTGGCCAACATGGCAAAACCCCGTCTGTAC |
| | | TCAAAATGCAAAAATTAGCCAGGCGTGGTAGCAGGCACCTGTAA |
| | | TCCCAGCTACTTGGGAGGCTGAGGCAGGAGAATCGCTTGAACC |
| | | CAGGAGGTGGAGGTTGCAGTAAGCTGAGATCGTGCCGTTGCAC |
| | | TCCAGCCTGGGCGACAAGAGCAAGACTCTGTCTCAGAAAAAAAA |
| | | AAAAAAAAGAGAGAGAGAGAGAAAGAGAACAATATTTGGGAGAG |
| | | AAGGATGGGGAAGCATTGCAAGGAAATTGTGCTTTATCCAACAA |
| | | AATGTAAGGAGCCAATAAGGGATCCCTATTTGTCTCTTTTGGTGT |
| | | CTATTTGTCCCTAACAACTGTCTTTGACAGTGAGAAAAATATTCA |
| | | GAATAACCATATCCCTGTGCCGTTATTACCTAGCAACCCTTGCAA |
| | | TGAAGATGAGCAGATCCACAGGAAAACTTGAATGCACAACTGTC |
| | | TTATTTTAATCTTATTGTACATAAGTTTGTAAAAGAGTTAAAAATT |
| | | GTTACTTCATGTATTCATTTATATTTTATATTATTTTGCGTCTAATG |
| | | ATTTTTTATTAACATGATTTCCTTTTCTGATATATTGAAATGGAGT |
| | | CTCAAAGCTTCATAAATTTATAACTTTAGAAATGATTCTAATAACA |
| | | ACGTATGTAATTGTAACATTGCAGTAATGGTGCTACGAAGCCATT |
| | | TCTCTTGATTTTTAGTAAACTTTTATGACAGCAAATTTGCTTCTGG |
| | | CTCACTTTCAATCAGTTAAATAAATGATAAATAATTTTGGAAGCTG |
| | | TGAAGATAAAATACCAAATAAAATAATATAAAAGTGATTTATATGA |
| | | AGTTAAAATAAAAAATCAGTATGATGGAATAAACTTG |
| Canine AID (ClAID) | 1374 | MDSLLMKQRKFLYHFKNVRWAKGRHETYLCYVVKRRDSATSFSLD |
| polypeptide | | FGHLRNKSGCHVELLFLRYISDWDLDPGRCYRVTWFTSWSPCYDC |
| sequence | | ARHVADFLRGYPNLSLRIFAARLYFCEDRKAEPEGLRRLHRAGVQI |
| | | AIMTFKDYFYCWNTFVENREKTFKAWEGLHENSVRLSRQLRRILLP |
| | | LYEVDDLRDAFRTLGL |
| Bovine AID (btAID) | 1375 | MDSLLKKQRQFLYQFKNVRWAKGRHETYLCYVVKRRDSPTSFSLD |
| polypeptide | | FGHLRNKAGCHVELLFLRYISDWDLDPGRCYRVTWFTSWSPCYDC |
| sequence | | ARHVADFLRGYPNLSLRIFTARLYFCDKERKAEPEGLRRLHRAGVQ |
| | | IAIMTFKDYFYCWNTFVENHERTFKAWEGLHENSVRLSRQLRRILLP |
| | | LYEVDDLRDAFRTLGL |
| Rat AID | 1376 | MAVGSKPKAALVGPHWERERIWCFLCSTGLGTQQTGQTSRWLRP |
| polypeptide | | AATQDPVSPPRSLLMKQRKFLYHFKNVRWAKGRHETYLCYVVKRR |
| sequence | | DSATSFSLDFGYLRNKSGCHVELLFLRYISDWDLDPGRCYRVTWFT |
| | | SWSPCYDCARHVADFLRGNPNLSLRIFTARLTGWGALPAGLMSPA |
| | | RPSDYFYCWNTFVENHERTFKAWEGLHENSVRLSRRLRRILLPLYE |
| | | VDDLRDAFRTLGL |
| Mouse (mAID) AID | 1377 | MDSLLMNRRKFLYQFKNVRWAKGRRETYLCYVVKRRDSATSFSLD |
| polypeptide | | FGYLRNKNGCHVELLFLRYISDWDLDPGRCYRVTWFTSWSPCYDC |
| sequence | | ARHVADFLRGNPNLSLRIFTARLYFCEDRKAEPEGLRRLHRAGVQI |
| | | AIMTFKDYFYCWNTFVENHERTFKAWEGLHENSVRLSRQLRRILLP |
| | | LYEVDDLRDAFRTLGL |
| rAPOBEC-1 | 1378 | MSSETGPVAVDPTLRRRIEPHEFEVFFDPRELRKETCLLYEINWGG |
| polypeptide | | RHSIWRHTSQNTNKHVEVNFIEKFTTERYFCPNTRCSITWFLSWSP |
| sequence | | CGECSRAITEFLSRYPHVTLFIYIARLYHHADPRNRQGLRDLISSGVT |
| | | IQIMTEQESGYCWRNFVNYSPSNEAHWPRYPHLWWVRLYVLELYCII |
| | | LGLPPCLNILRRKQPQLTFFTIALQSCHYQRLPPHILWATGLK |
| maAPOBEC-1 | 1379 | MSSETGPVVVDPTLRRRIEPHEFDAFFDQGELRKETCLLYEIRWGG |
| polypeptide | | RHNIWRHTGQNTSRHVEINFIEKFTSERYFYPSTRCSIVWFLSWSP |
| sequence | | CGECSKAITEFLSGHPNVTLFIYAARLYHHTDQRNRQGLRDLISRGV |
| | | TIRIMTEQEYCYCWRNFVNYPPSNEVYWPRYPNLWMRLYALELYCI |
| | | HLGLPPCLKIKRRHQYPLTFFRLNLQSCHYQRIPPHILWATGFI |
| ppAPOBEC-1 | 1380 | MTSEKGPSTGDPTLRRRIESWEFDVFYDPRELRKETCLLYEIKWGM |
| polypeptide | | SRKIWRSSGKNTTNHVEVNFIKKFTSERRFHSSISCSITWFLSWSPC |
| sequence | | WECSQAIREFLSQHPGVTLVIYVARLFWHMDQRNRQGLRDLVNSG |
| | | VTIQIMRASEYYHCWRNFVNYPPGDEAHWPQYPPLWMMLYALELH |
| | | CIILSLPPCLKISRRWQNHLAFFRLHLQNCHYQTIPPHILLATGLIHPS |
| | | VTWR |
| OCAPOBEC1 | 1381 | MASEKGPSNKDYTLRRRIEPWEFEVFFDPQELRKEACLLYEIKWGA |
| polypeptide | | SSKTWRSSGKNTTNHVEVNFLEKLTSEGRLGPSTCCSITWFLSWS |
| sequence | | PCWECSMAIREFLSQHPGVTLIIFVARLFQHMDRRNRQGLKDLVTS |
| | | GVTVRVMSVSEYCYCWENFVNYPPGKAAQWPRYPPRWMLMYAL |
| | | ELYCIILGLPPCLKISRRHQKQLTFFSLTPQYCHYKMIPPYILLATGLL |
| | | QPSVPWR |
| mdAPOBEC-1 | 1382 | MNSKTGPSVGDATLRRRIKPWEFVAFFNPQELRKETCLLYEIKWGN |
| polypeptide | | QNIWRHSNQNTSQHAEINFMEKFTAERHFNSSVRCSITWFLSWSP |
| sequence | | CWECSKAIRKFLDHYPNVTLAIFISRLYWHMDQQHRQGLKELVHSG |
| | | VTIQIMSYSEYHYCWRNFVDYPQGEEDYWPKYPYLWIMLYVLELH |
| | | CIILGLPPCLKISGSHSNQLALFSLDLQDCHYQKIPYNVLVATGLVQP |
| | | FVTWR |
| ppAPOBEC-2 | 1383 | MAQKEEAAAATEAASQNGEDLENLDDPEKLKELIELPPFEIVTGERL |
| polypeptide | | PANFFKFQFRNVEYSSGRNKTFLCYVVEAQGKGGQVQASRGYLE |
| sequence | | DEHAAAHAEEAFFNTILPAFDPALRYNVTWYVSSSPCAACADRIIKT |
| | | LSKTKNLRLLILVGRLFMWEELEIQDALKKLKEAGCKLRIMKPQDFE |
| | | YVWQNFVEQEEGESKAFQPWEDIQENFLYYEEKLADILK |
| btAPOBEC-2 | 1384 | MAQKEEAAAAAEPASQNGEEVENLEDPEKLKELIELPPFEIVTGERL |
| polypeptide | | PAHYFKFQFRNVEYSSGRNKTFLCYVVEAQSKGGQVQASRGYLED |
| sequence | | EHATNHAEEAFFNSIMPTFDPALRYMVTWYVSSSPCAACADRIVKT |
| | | LNKTKNLRLLILVGRLFMWEEPEIQAALRKLKEAGCRLRIMKPQDFE |
| | | YIWQNFVEQEEGESKAFEPWEDIQENFLYYEEKLADILK |
| mAPOBEC-3-(1) | 1385 | MQPQRLGPRAGMGPFCLGCSHRKCYSPIRNLISQETFKFHFKNLG |
| polypeptide | | YAKGRKDTFLCYEVTRKDCDSPVSLHHGVFKNKDNIHAEICFLYWF |
| sequence | | HDKVLKVLSPREEFKITWYMSWSPCFECAEQIVRFLATHHNLSLDIF |
| | | SSRLYNVQDPETQQNLCRLVQEGAQVAAMDLYEFKKCWKKFVDN |
| | | GGRRFRPWKRLLTNFRYQDSKLQEILRPCYISVPSSSSSTLSNICLT |
| | | KGLPETRFWVEGRRMDPLSEEEFYSQFYNQRVKHLCYYHRMKPY |
| | | LCYQLEQFNGQAPLKGCLLSEKGKQHAEILFLDKIRSMELSQVTITC |
| | | YLTWSPCPNCAWQLAAFKRDRPDLILHIYTSRLYFHWKRPFQKGLC |
| | | SLWQSGILVDVMDLPQFTDCWTNFVNPKRPFWPWKGLEIISRRTQ |
| | | RRLRRIKESWGLQDLVNDFGNLQLGPPMS |
| APOBEC-3-(2) | 1386 | MGPFCLGCSHRKCYSPIRNLISQETFKFHFKNLGYAKGRKDTFLCY |
| (Mouse APOBEC-3) | | EVTRKDCDSPVSLHHGVFKNKDNIHAEICFLYWFHDKVLKVLSPRE |
| polypeptide | | EFKITWYMSWSPCFECAEQIVRFLATHHNLSLDIFSSRLYNVQDPET |
| sequence | | QQNLCRLVQEGAQVAAMDLYEFKKCWKKFVDNGGRRFRPWKRLL |
| | | TNFRYQDSKLQEILRPCYIPVPSSSSSTLSNICLTKGLPETRFCVEG |
| | | RRMDPLSEEEFYSQFYNQRVKHLCYYHRMKPYLCYQLEQFNGQA |
| | | PLKGCLLSEKGKQHAEILFLDKIRSMELSQVTITCYLTWSPCPNCAW |
| | | QLAAFKRDRPDLILHIYTSRLYFHWKRPFQKGLCSLWQSGILVDVM |
| | | DLPQFTDCWTNFVNPKRPFWPWKGLEIISRRTQRRLRRIKESWGL |
| | | QDLVNDFGNLQLGPPMS |
| APOBEC-3 | 1387 | MGPFCLGCSHRKCYSPIRNLISQETFKFHFKNRLRYAIDRKDTFLCY |
| polypeptide | | EVTRKDCDSPVSLHHGVFKNKDNIHAEICFLYWFHDKVLKVLSPRE |
| sequence | | EFKITWYMSWSPCFECAEQVLRFLATHHNLSLDIFSSRLYNIRDPEN |
| | | QQNLCRLVQEGAQVAAMDLYEFKKCWKKFVDNGGRRFRPWKKLL |
| | | TNFRYQDSKLQEILRPCYIPVPSSSSSTLSNICLTKGLPETRFCVER |
| | | RRVHLLSEEEFYSQFYNQRVKHLCYYHGVKPYLCYQLEQFNGQAP |
| | | LKGCLLSEKGKQHAEILFLDKIRSMELSQVIITCYLTWSPCPNCAWQ |
| | | LAAFKRDRPDLILHIYTSRLYFHWKRPFQKGLCSLWQSGILVDVMDL |
| | | PQFTDCWTNFVNPKRPFWPWKGLEIISRRTQRRLHRIKESWGLQD |
| | | LVNDFGNLQLGPPMS |
| hAPOBEC-3A | 1388 | MEASPASGPRHLMDPHIFTSNFNNGIGRHKTYLCYEVERLDNGTSV |
| polypeptide | | KMDQHRGFLHNQAKNLLCGFYGRHAELRFLDLVPSLQLDPAQIYR |
| sequence | | VTWFISWSPCFSWGCAGEVRAFLQENTHVRLRIFAARIYDYDPLYK |
| | | EALQMLRDAGAQVSIMTYDEFKHCWDTFVDHQGCPFQPWDGLDE |
| | | HSQALSGRLRAILQNQGN |
| hAPOBEC-3F | 1389 | MKPHFRNTVERMYRDTFSYNFYNRPILSRRNTVWLCYEVKTKGPS |
| polypeptide | | RPRLDAKIFRGQVYSQPEHHAEMCFLSWFCGNQLPAYKCFQITWF |
| sequence | | VSWTPCPDCVAKLAEFLAEHPNVTLTISAARLYYYWERDYRRALCR |
| | | LSQAGARVKIMDDEEFAYCWENFVYSEGQPFMPWYKFDDNYAFL |
| | | HRTLKEILRNPMEAMYPHIFYFHFKNLRKAYGRNESWLCFTMEVVK |
| | | HHSPVSWKRGVFRNQVDPETHCHAERCFLSWFCDDILSPNTNYEV |
| | | TWYTSWSPCPECAGEVAEFLARHSNVNLTIFTARLYYFWDTDYQE |
| | | GLRSLSQEGASVEIMGYKDFKYCWENFVYNDDEPFKPWKGLKYNF |
| | | LFLDSKLQEILE |
| Rhesus macaque | 1390 | MVEPMDPRTFVSNFNNRPILSGLNTVWLCCEVKTKDPSGPPLDAKI |
| APOBEC-3G | | FQGKVYSKAKYHPEMRFLRWFHKWRQLHHDQEYKVTWYVSWSP |
| polypeptide | | CTRCANSVATFLAKDPKVTLTIFVARLYYFWKPDYQQALRILCQKR |
| sequence | | GGPHATMKIMNYNEFQDCWNKFVDGRGKPFKPRNNLPKHYTLLQ |
| | | ATLGELLRHLMDPGTFTSNFNNKPWVSGQHETYLCYKVERLHNDT |
| | | WWVPLNQHRGFLRNQAPNIHGFPKGRHAELCFLDLIPFWKLDGQQY |
| | | RVTCFTSWSPCFSCAQEMAKFISNNEHVSLCIFAARIYDDQGRYQE |
| | | GLRALHRDGAKIAMMNYSEFEYCWDTFVDRQGRPFQPWDGLDEH |
| | | SQALSGRLRAI |
| Chimpanzee | 1391 | MKPHFRNPVERMYQDTFSDNFYNRPILSHRNTVWLCYEVKTKGPS |
| APOBEC-3G | | RPPLDAKIFRGQVYSKLKYHPEMRFFHWFSKWRKLHRDQEYEVT |
| polypeptide | | WYISWSPCTKCTRDVATFLAEDPKVTLTIFVARLYYFWDPDYQEAL |
| sequence | | RSLCQKRDGPRATMKIMNYDEFQHCWSKFVYSQRELFEPWNNLP |
| | | KYYILLHIMLGEILRHSMDPPTFTSNFNNELWVRGRHETYLCYEVER |
| | | LHNDTWWLLNQRRGFLCNQAPHKHGFLEGRHAELCFLDVIPFWKL |
| | | DLHQDYRVTCFTSWSPCFSCAQEMAKFISNNKHVSLCIFAARIYDD |
| | | QGRCQEGLRTLAKAGAKISIMTYSEFKHCWDTFVDHQGCPFQPWD |
| | | GLEEHSQALSGRLRAILQNQGN |
| Green monkey | 1392 | MNPQIRNMVEQMEPDIFVYYFNNRPILSGRNTVWLCYEVKTKDPS |
| APOBEC-3G | | GPPLDANIFQGKLYPEAKDHPEMKFLHWFRKWRQLHRDQEYEVT |
| polypeptide | | WYVSWSPCTRCANSVATFLAEDPKVTLTIFVARLYYFWKPDYQQA |
| sequence | | LRILCQERGGPHATMKIMNYNEFQHCWNEFVDGQGKPFKPRKNLP |
| | | KHYTLLHATLGELLRHVMDPGTFTSNFNNKPWVSGQRETYLCYKV |
| | | ERSHNDTWLLNQHRGFLRNQAPDRHGFPKGRHAELCFLDLIPFW |
| | | KLDDQQYRVTCFTSWSPCFSCAQKMAKFISNNKHVSLCIFAARIYD |
| | | DQGRCQEGLRTLHRDGAKIAVMNYSEFEYCWDTFVDRQGRPFQP |
| | | WDGLDEHSQALSGRLRAI |
| Human APOBEC- | 1393 | MKPHFRNTVERMYRDTFSYNFYNRPILSRRNTVWLCYEVKTKGPS |
| 3G polypeptide | | RPPLDAKIFRGQVYSELKYHPEMRFFHWFSKWRKLHRDQEYEVT |
| sequence | | WYISWSPCTKCTRDMATFLAEDPKVTLTIFVARLYYFWDPDYQEAL |
| | | RSLCQKRDGPRATMKIMNYDEFQHCWSKFVYSQRELFEPWNNLP |
| | | KYYILLHIMLGEILRHSMDPPTFTFNFNNEPWRGRHETYLCYEVER |
| | | MHNDTWWLLNQRRGFLCNQAPHKHGFLEGRHAELCFLDVIPFWKL |
| | | DLDQDYRVTCFTSWSPCFSCAQEMAKFISKNKHVSLCIFTARIYDD |
| | | QGRCQEGLRTLAEAGAKISIMTYSEFKHCWDTFVDHQGCPFQPWD |
| | | GLDEHSQDLSGRLRAILQNQEN |
| Human APOBEC- | 1394 | MNPQIRNPMERMYRDTFYDNFENEPILYGRSYTWLCYEVKIKRGR |
| 3B polypeptide | | SNLLWDTGVFRGQVYFKPQYHAEMCFLSWFCGNQLPAYKCFQIT |
| sequence | | WFVSWTPCPDCVAKLAEFLSEHPNVTLTISAARLYYYWERDYRRAL |
| | | CRLSQAGARVTIMDYEEFAYCWENFVYNEGQQFMPWYKFDENYA |
| | | FLHRTLKEILRYLMDPDTFTFNFNNDPLVLRRRQTYLCYEVERLDN |
| | | GTWWLMDQHMGFLCNEAKNLLCGFYGRHAELRFLDLVPSLQLDPA |
| | | QIYRVTWFISWSPCFSWGCAGEVRAFLQENTHVRLRIFAARIYDYD |
| | | PLYKEALQMLRDAGAQVSIMTYDEFEYCWDTFVYRQGCPFQPWD |
| | | GLEEHSQALSGRLRAILQNQGN |
| Rat APOBEC-3B | 1395 | MQPQGLGPNAGMGPVCLGCSHRRPYSPIRNPLKKLYQQTFYFHFK |
| polypeptide | | NVRYAWGRKNNFLCYEVNGMDCALPVPLRQGVFRKQGHIHAELC |
| sequence | | FIYWFHDKVLRVLSPMEEFKVTWYMSWSPCSKCAEQVARFLAAHR |
| | | NLSLAIFSSRLYYYLRNPNYQQKLCRLIQEGVHVAAMDLPEFKKCW |
| | | NKFVDNDGQPFRPWMRLRINFSFYDCKLQEIFSRMNLLREDVFYLQ |
| | | FNNSHRVKPVQNRYYRRKSYLCYQLERANGQEPLKGYLLYKKGEQ |
| | | HVEILFLEKMRSMELSQVRITCYLTWSPCPNCARQLAAFKKDHPDLI |
| | | LRIYTSRLYFWRKKFQKGLCTLWRSGIHVDVMDLPQFADCWTNFV |
| | | NPQRPFRPWNELEKNSWRIQRRLRRIKESWGL |
| Bovine APOBEC- | 1396 | DGWEVAFRSGTVLKAGVLGVSMTEGWAGSGHPGQGACVWTPGT |
| 3B polypeptide | | RNTMNLLREVLFKQQFGNQPRVPAPYYRRKTYLCYQLKQRNDLTL |
| sequence | | DRGCFRNKKQRHAERFIDKINSLDLNPSQSYKIICYITWSPCPNCAN |
| | | ELVNFITRNNHLKLEIFASRLYFHWIKSFKMGLQDLQNAGISVAVMT |
| | | HTEFEDCWEQFVDNQSRPFQPWDKLEQYSASIRRRLQRILTAPI |
| Chimpanzee | 1397 | MNPQIRNPMEWMYQRTFYYNFENEPILYGRSYTWLCYEVKIRRGH |
| APOBEC-3B | | SNLLWDTGVFRGQMYSQPEHHAEMCFLSWFCGNQLSAYKCFQIT |
| polypeptide | | WFVSWTPCPDCVAKLAKFLAEHPNVTLTISAARLYYYWERDYRRAL |
| sequence | | CRLSQAGARVKIMDDEEFAYCWENFVYNEGQPFMPWYKFDDNYA |
| | | FLHRTLKEIIRHLMDPDTFTFNFNNDPLVLRRHQTYLCYEVERLDNG |
| | | TWWLMDQHMGFLCNEAKNLLCGFYGRHAELRFLDLVPSLQLDPAQ |
| | | IYRVTWFISWSPCFSWGCAGQVRAFLQENTHVRLRIFAARIYDYDP |
| | | LYKEALQMLRDAGAQVSIMTYDEFEYCWDTFVYRQGCPFQPWDG |
| | | LEEHSQALSGRLRAILQVRASSLCMVPHRPPPPPQSPGPCLPLCSE |
| | | PPLGSLLPTGRPAPSLPFLLTASFSFPPPASLPPLPSLSLSPGHLPV |
| | | PSFHSLTSCSIQPPCSSRIRETEGWASVSKEGRDLG |
| Human APOBEC- | 1398 | MNPQIRNPMKAMYPGTFYFQFKNLWEANDRNETWLCFTVEGIKRR |
| 3C polypeptide | | SVVSWKTGVFRNQVDSETHCHAERCFLSWFCDDILSPNTKYQVTW |
| sequence | | YTSWSPCPDCAGEVAEFLARHSNVNLTIFTARLYYFQYPCYQEGLR |
| | | SLSQEGVAVEIMDYEDFKYCWENFVYNDNEPFKPWKGLKTNFRLL |
| | | KRRLRESLQ |
| Gorilla APOBEC- | 1399 | MNPQIRNPMKAMYPGTFYFQFKNLWEANDRNETWLCFTVEGIKRR |
| 3C polypeptide | | SVVSWKTGVFRNQVDSETHCHAERCFLSWECDDILSPNTNYQVT |
| sequence | | WYTSWSPCPECAGEVAEFLARHSNVNLTIFTARLYYFQDTDYQEG |
| | | LRSLSQEGVAVKIMDYKDFKYCWENFVYNDDEPFKPWKGLKYNFR |
| | | FLKRRLQEILE |
| Rhesus macaque | 1400 | MDGSPASRPRHLMDPNTFTFNFNNDLSVRGRHQTYLCYEVERLDN |
| APOBEC-3A | | GTWWPMDERRGFLCNKAKNVPCGDYGCHVELRFLCEVPSWQLDP |
| polypeptide | | AQTYRVTWFISWSPCFRRGCAGQVRVFLQENKHVRLRIFAARIYDY |
| sequence | | DPLYQEALRTLRDAGAQVSIMTYEEFKHCWDTFVDRQGRPFQPW |
| | | DGLDEHSQALSGRLRAILQNQGN |
| Bovine APOBEC- | 1401 | MDEYTFTENFNNQGWPSKTYLCYEMERLDGDATIPLDEYKGFVRN |
| 3A polypeptide | | KGLDQPEKPCHAELYFLGKIHSWNLDRNQHYRLTCFISWSPCYDC |
| sequence | | AQKLTTFLKENHHISLHILASRIYTHNRFGCHQSGLCELQAAGARITI |
| | | MTFEDFKHCWETFVDHKGKPFQPWEGLNVKSQALCTELQAILKTQ |
| | | QN |
| Human APOBEC- | 1402 | MALLTAETFRLQFNNKRRLRRPYYPRKALLCYQLTPQNGSTPTRGY |
| 3H polypeptide | | FENKKKCHAEICFINEIKSMGLDETQCYQVTCYLTWSPCSSCAWEL |
| sequence | | VDFIKAHDHLNLGIFASRLYYHWCKPQQKGLRLLCGSQVPVEVMGF |
| | | PKFADCWENFVDHEKPLSFNPYKMLEELDKNSRAIKRRLERIKIPGV |
| | | RAQGRYMDILCDAEV |
| Rhesus macaque | 1403 | MALLTAKTFSLQFNNKRRVNKPYYPRKALLCYQLTPQNGSTPTRG |
| APOBEC-3H | | HLKNKKKDHAEIRFINKIKSMGLDETQCYQVTCYLTWSPCPSCAGE |
| polypeptide | | LVDFIKAHRHLNLRIFASRLYYHWRPNYQEGLLLLCGSQVPVEVMG |
| sequence | | LPEFTDCWENFVDHKEPPSFNPSEKLEELDKNSQAIKRRLERIKSR |
| | | SVDVLENGLRSLQLGPVTPSSSIRNSR |
| Human APOBEC- | 1404 | MNPQIRNPMERMYRDTFYDNFENEPILYGRSYTWLCYEVKIKRGR |
| 3D polypeptide | | SNLLWDTGVFRGPVLPKRQSNHRQEVYFRFENHAEMCFLSWFCG |
| sequence | | NRLPANRRFQITWFVSWNPCLPCVVKVTKFLAEHPNVTLTISAARL |
| | | YYYRDRDWRWLLRLHKAGARVKIMDYEDFAYCWENFVCNEGQP |
| | | FMPWYKFDDNYASLHRTLKEILRNPMEAMYPHIFYFHFKNLLKACG |
| | | RNESWLCFTMEVTKHHSAVFRKRGVFRNQVDPETHCHAERCFLS |
| | | WFCDDILSPNTNYEVTWYTSWSPCPECAGEVAEFLARHSNVNLTIF |
| | | TARLCYFWDTDYQEGLCSLSQEGASVKIMGYKDFVSCWKNFVYSD |
| | | DEPFKPWKGLQTNFRLLKRRLREILQ |
| Human APOBEC-1 | 1405 | MTSEKGPSTGDPTLRRRIEPWEFDVFYDPRELRKEACLLYEIKWG |
| polypeptide | | MSRKIWRSSGKNTTNHVEVNFIKKFTSERDFHPSMSCSITWFLSWS |
| sequence | | PCWECSQAIREFLSRHPGVTLVIYVARLFWHMDQQNRQGLRDLVN |
| | | SGVTIQIMRASEYYHCWRNFVNYPPGDEAHWPQYPPLWMMLYAL |
| | | ELHCIILSLPPCLKISRRWQNHLTFFRLHLQNCHYQTIPPHILLATGLI |
| | | HPSVAWR |
| Mouse APOBEC-1 | 1406 | MSSETGPVAVDPTLRRRIEPHEFEVFFDPRELRKETCLLYEINWGG |
| polypeptide | | RHSVWRHTSQNTSNHVEVNFLEKFTTERYFRPNTRCSITWFLSWS |
| sequence | | PCGECSRAITEFLSRHPYVTLFIYIARLYHHTDQRNRQGLRDLISSG |
| | | VTIQIMTEQEYCYCWRNFVNYPPSNEAYWPRYPHLWKLYVLELY |
| | | CIILGLPPCLKILRRKQPQLTFFTITLQTCHYQRIPPHLLWATGLK |
| Human APOBEC-2 | 1407 | MAQKEEAAVATEAASQNGEDLENLDDPEKLKELIELPPFEIVTGERL |
| polypeptide | | PANFFKFQFRNVEYSSGRNKTFLCYVVEAQGKGGQVQASRGYLE |
| sequence | | DEHAAAHAEEAFFNTILPAFDPALRYNVTWYVSSSPCAACADRIIKT |
| | | LSKTKNLRLLILVGRLFMWEEPEIQAALKKLKEAGCKLRIMKPQDFE |
| | | YVWQNFVEQEEGESKAFQPWEDIQENFLYYEEKLADILK |
| Mouse APOBEC-2 | 1408 | MAQKEEAAEAAAPASQNGDDLENLEDPEKLKELIDLPPFEIVTGVRL |
| polypeptide | | PVNFFKFQFRNVEYSSGRNKTFLCYVVEVQSKGGQAQATQGYLED |
| sequence | | EHAGAHAEEAFFNTILPAFDPALKYNVTWYVSSSPCAACADRILKTL |
| | | SKTKNLRLLILVSRLFMWEEPEVQAALKKLKEAGCKLRIMKPQDFEY |
| | | IWQNFVEQEEGESKAFEPWEDIQENFLYYEEKLADILK |
| Rat APOBEC-2 | 1409 | MAQKEEAAEAAAPASQNGDDLENLEDPEKLKELIDLPPFEIVTGVRL |
| polypeptide | | PVNFFKFQFRNVEYSSGRNKTFLCYVVEAQSKGGQVQATQGYLED |
| sequence | | EHAGAHAEEAFFNTILPAFDPALKYNVTWYVSSSPCAACADRILKTL |
| | | SKTKNLRLLILVSRLFMWEEPEVQAALKKLKEAGCKLRIMKPQDFEY |
| | | LWQNFVEQEEGESKAFEPWEDIQENFLYYEEKLADILK |
| Petromyzon | 1410 | MTDAEYVRIHEKLDIYTFKKQFFNNKKSVSHRCYVLFELKRRGERR |
| marinus CDA1 | | ACFWGYAVNKPQSGTERGIHAEIFSIRKVEEYLRDNPGQFTINWYS |
| (pmCDAI) | | SWSPCADCAEKILEWYNQELRGNGHTLKIWACKLYYEKNARNQIG |
| polypeptide | | LWNLRDNGVGLNVMVSEHYQCCRKIFIQSSHNQLNENRWLEKTLK |
| sequence | | RAEKRRSELSFMIQVKILHTTKSPAV |
| Human | 1411 | MKPHFRNTVERMYRDTFSYNFYNRPILSRRNTVWLCYEVKTKGPS |
| APOBEC3G | | RPPLDAKIFRGQVYSELKYHPEMRFFHWFSKWRKLHRDQEYEVT |
| D316R D317R | | WYISWSPCTKCTRDMATFLAEDPKVTLTIFVARLYYFWDPDYQEAL |
| polypeptide | | RSLCQKRDGPRATMKFNYDEFQHCWSKFVYSQRELFEPWNNLPK |
| sequence | | YYILLHFMLGEILRHSMDPPTFTFNFNNEPWRGRHETYLCYEVER |
| | | MHNDTWWLLNQRRGFLCNQAPHKHGFLEGRHAELCFLDVIPFWKL |
| | | DLDQDYRVTCFTSWSPCFSCAQEMAKFISKKHVSLCIFTARIYRRQ |
| | | GRCQEGLRTLAEAGAKISFTYSEFKHCWDTFVDHQGCPFQPWDG |
| | | LDEHSQDLSGRLRAILQNQEN |
| Human | 1412 | MDPPTFTFNFNNEPWWGRHETYLCYEVERMHNDTWLLNQRRGF |
| APOBEC3G chain | | LCNQAPHKHGFLEGRHAELCFLDVIPFWKLDLDQDYRVTCFTSWS |
| A polypeptide | | PCFSCAQEMAKFISKNKHVSLCIFTARIYDDQGRCQEGLRTLAEAG |
| sequence | | AKISFTYSEFKHCWDTFVDHQGCPFQPWDGLDEHSQDLSGRLRAI |
| | | LQ |
| Human | 1414 | MDPPTFTFNFNNEPWWRGRHETYLCYEVERMHNDTWLLNQRRG |
| APOBEC3G chain | | FLCNQAPHKHGFLEGRHAELCFLDVIPFWKLDLDQDYRVTCFTSW |
| A D120R D121R | | SPCFSCAQEMAKFISKNKHVSLCIFTARIYRRQGRCQEGLRTLAEA |
| polypeptide | | GAKISFMTYSEFKHCWDTFVDHQGCPFQPWDGLDEHSQDLSGRL |
| sequence | | RAILQ |
| hAPOBEC-4 | 1415 | MEPIYEEYLANHGTIVKPYYWLSFSLDCSNCPYHIRTGEEARVSLTE |
| polypeptide | | FCQIFGFPYGTTFPQTKHLTFYELKTSSGSLVQKGHASSCTGNYIHP |
| sequence | | ESMLFEMNGYLDSAIYNNDSIRHIILYSNNSPCNEANHCCISKMYNF |
| | | LITYPGITLSIYFSQLYHTEMDFPASAWNREALRSLASLWPRVVLSPI |
| | | SGGIWHSVLHSFISGVSGSHVFQPILTGRALADRHNAYEINAITGVK |
| | | PYFTDVLLQTKRNPNTKAQEALESYPLNNAFPGQFFQMPSGQLQP |
| | | NLPPDLRAPVVFVLVPLRDLPPMHMGQNPNKPRNIVRHLNMPQMS |
| | | FQETKDLGRLPTGRSVEIVEITEQFASSKEADEKKKKKGKK |
| rAPOBEC-4 | 1416 | MEPLYEEYLTHSGTIVKPYYWLSVSLNCTNCPYHIRTGEEARVPYT |
| polypeptide | | EFHQTFGFPWSTYPQTKHLTFYELRSSSGNLIQKGLASNCTGSHTH |
| sequence | | PESMLFERDGYLDSLIFHDSNIRHIILYSNNSPCDEANHCCISKMYNF |
| | | LMNYPEVTLSVFFSQLYHTENQFPTSAWNREALRGLASLWPQVTL |
| | | SAISGGIWQSILETFVSGISEGLTAVRPFTAGRTLTDRYNAYEINCIT |
| | | EVKPYFTDALHSWQKENQDQKVWAASENQPLHNTTPAQWQPDM |
| | | SQDCRTPAVFMLVPYRDLPPIHVNPSPQKPRTVVRHLNTLQLSASK |
| | | VKALRKSPSGRPVKKEEARKGSTRSQEANETNKSKWKKQTLFIKS |
| | | NICHLLEREQKKIGILSSWSV |
| rAPOBEC-1 (delta | 1421 | MSSETGPVAVDPTLRRRIEPHEFEVFFDPRELRKETCLLYEINWGG |
| 177-186) | | RHSIWRHTSQNTNKHVEVNFIEKFTTERYFCPNTRCSITWFLSWSP |
| polypeptide | | CGECSRAITEFLSRYPHVTLFIYIARLYHHADPRNRQGLRDLISSGVT |
| sequence | | IQIMTEQESGYCWRNFVNYSPSNEAHWPRYPHLWWVRGLPPCLNIL |
| | | RRKQPQLTFFTIALQSCHYQRLPPHILWATGLK |
| rAPOBEC-1 (delta | 1422 | MSSETGPVAVDPTLRRRIEPHEFEVFFDPRELRKETCLLYEINWGG |
| 202-213) | | RHSIWRHTSQNTNKHVEVNFIEKFTTERYFCPNTRCSITWFLSWSP |
| polypeptide | | CGECSRAITEFLSRYPHVTLFIYIARLYHHADPRNRQGLRDLISSGVT |
| sequence | | IQIMTEQESGYCWRNFVNYSPSNEAHWPRYPHLWRLYVLELYCII |
| | | LGLPPCLNILRRKQPQHYQRLPPHILWATGLK |
| mouse AID | 1373 | MDSLLMKQKKFLYHFKNVRWAKGRHETYLCYVVKRRDSATSCSLD |
| (mAPOBEC-4) | | FGHLRNKSGCHVELLFLRYISDWDLDPGRCYRVTWFTSWSPCYDC |
| polypeptide | | ARHVAEFLRWNPNLSLRIFTARLYFCEDRKAEPEGLRRLHRAGVQI |
| sequence | | GIMTFKDYFYCWNTFVENRERTFKAWEGLHENSVRLTRQLRRILLP |
| | | LYEVDDLRDAFRMLGF |
| pmCDA-1 | 1417 | MAGYECVRVSEKLDFDTFEFQFENLHYATERHRTYVIFDVKPQSAG |
| polypeptide | | GRSRRLWGYIINNPNVCHAELILMSMIDRHLESNPGVYAMTWYMS |
| sequence | | WSPCANCSSKLNPWLKNLLEEQGHTLTMHFSRIYDRDREGDHRGL |
| | | RGLKHVSNSFRMGVVGRAEVKECLAEYVEASRRTLTWLDTTESMA |
| | | AKMRRKLFCILVRCAGMRESGIPLHLFTLQTPLLSGRVVWWRV |
| pmCDA-2 | 1418 | MELREVVDCALASCVRHEPLSRVAFLRCFAAPSQKPRGTVILFYVE |
| polypeptide | | GAGRGVTGGHAVNYNKQGTSIHAEVLLLSAVRAALLRRRRCEDGE |
| sequence | | EATRGCTLHCYSTYSPCRDCVEYIQEFGASTGVRVVIHCCRLYELD |
| | | VNRRRSEAEGVLRSLSRLGRDFRLMGPRDAIALLLGGRLANTADG |
| | | ESGASGNAWTETNVVEPLVDMTGFGDEDLHAQVQRNKQIREAY |
| | | ANYASAVSLMLGELHVDPDKFPFLAEFLAQTSVEPSGTPRETRGRP |
| | | RGASSRGPEIGRQRPADFERALGAYGLFLHPRIVSREADREEIKRD |
| | | LIVVMRKHNYQGP |
| pmCDA-5 | 1419 | MAGDENVRVSEKLDFDTFEFQFENLHYATERHRTYVIFDVKPQSAG |
| polypeptide | | GRSRRLWGYIINNPNVCHAELILMSMIDRHLESNPGVYAMTWYMS |
| sequence | | WSPCANCSSKLNPWLKNLLEEQGHTLMMHFSRIYDRDREGDHRG |
| | | LRGLKHVSNSFRMGVVGRAEVKECLAEYVEASRRTLTWLDTTESM |
| | | AAKMRRKLFCILVRCAGMRESGMPLHLFT |
| yCD polypeptide | 1420 | MVTGGMASKWDQKGMDIAYEEAALGYKEGGVPIGGCLINNKDGSV |
| sequence | | LGRGHNMRFQKGSATLHGEISTLENCGRLEGKVYKDTTLYTTLSPC |
| | | DMCTGAIIMYGIPRCVVGENVNFKSKGEKYLQTRGHEVVVVDDER |
| | | CKKIMKQFIDERPQDWFEDIGE |
| NLS | 84 | KRTADGSEFESPKKKRKV |
| NLS | 85 | KRPAATKKAGQAKKKK |
| NLS | 86 | KKTELQTTNAENKTKKL |
| NLS | 87 | KRGINDRNFWRGENGRKTR |
| NLS | 88 | RKSGKIAAIVVKRPRK |
| NLS | 89 | PKKKRKV |
| NLS | 90 | MDSLLMNRRKFLYQFKNVRWAKGRRETYLC |
| WT cas9 domain | 223 | MDKKYSIGLDIGTNSVGWAVITDEYKVPSKKFKVLGNTDRHSIKKNL |
| | | IGALLFDSGETAEATRLKRTARRRYTRRKNRICYLQEIFSNEMAKVD |
| | | DSFFHRLEESFLVEEDKKHERHPIFGNIVDEVAYHEKYPTIYHLRKK |
| | | LVDSTDKADLRLIYLALAHMIKFRGHFLIEGDLNPDNSDVDKLFIQLV |
| | | QTYNQLFEENPINASGVDAKAILSARLSKSRRLENLIAQLPGEKKNG |
| | | LFGNLIALSLGLTPNFKSNFDLAEDAKLQLSKDTYDDDLDNLLAQIG |
| | | DQYADLFLAAKNLSDAILLSDILRVNTEITKAPLSASMIKRYDEHHQD |
| | | LTLLKALVRQQLPEKYKEIFFDQSKNGYAGYIDGGASQEEFYKFIKPI |
| | | LEKMDGTEELLVKLNREDLLRKQRTFDNGSIPHQIHLGELHAILRRQ |
| | | EDFYPFLKDNREKIEKILTFRIPYYVGPLARGNSRFAWMTRKSEETIT |
| | | PWNFEEVVDKGASAQSFIERMTNFDKNLPNEKVLPKHSLLYEYFTV |
| | | YNELTKVKYVTEGMRKPAFLSGEQKKAIVDLLFKTNRKVTVKQLKE |
| | | DYFKKIECFDSVEISGVEDRFNASLGTYHDLLKIIKDKDFLDNEENED |
| | | ILEDIVLTLTLFEDREMIEERLKTYAHLFDDKVMKQLKRRRYTGWGR |
| | | LSRKLINGIRDKQSGKTILDFLKSDGFANRNFMQLIHDDSLTFKEDIQ |
| | | KAQVSGQGDSLHEHIANLAGSPAIKKGILQTVKVVDELVKVMGRHK |
| | | PENIVIEMARENQTTQKGQKNSRERMKRIEEGIKELGSQILKEHPVE |
| | | NTQLQNEKLYLYYLQNGRDMYVDQELDINRLSDYDVDHIVPQSFLK |
| | | DDSIDNKVLTRSDKNRGKSDNVPSEEVVKKMKNYWRQLLNAKLITQ |
| | | RKFDNLTKAERGGLSELDKAGFIKRQLVETRQITKHVAQILDSRMNT |
| | | KYDENDKLIREVKVITLKSKLVSDFRKDFQFYKVREINNYHHAHDAY |
| | | LNAVVGTALIKKYPKLESEFVYGDYKVYDVRKMIAKSEQEIGKATAK |
| | | YFFYSNIMNFFKTEITLANGEIRKRPLIETNGETGEIVWDKGRDFATV |
| | | RKVLSMPQVNIVKKTEVQTGGFSKESILPKRNSDKLIARKKDWDPK |
| | | KYGGFDSPTVAYSVLVVAKVEKGKSKKLKSVKELLGITIMERSSFEK |
| | | NPIDFLEAKGYKEVKKDLIIKLPKYSLFELENGRKRMLASAGELQKG |
| | | NELALPSKYVNFLYLASHYEKLKGSPEDNEQKQLFVEQHKHYLDEII |
| | | EQISEFSKRVILADANLDKVLSAYNKHRDKPIREQAENIIHLFTLTNLG |
| | | APAAFKYFDTTIDRKRYTSTKEVLDATLIHQSITGLYETRIDLSQLGG |
| | | D |
| gRNA scaffold | 230 | GUUUUAGAGCUAGAAAUAGCAAGUUAAAAUAAGGCUAGUCCGU |
| nucleotide | | UAUCAACUUGAAAAAGUGGGACCGAGUCGGUGCUUUU |
| sequence | | |
| wild type spCas9 | 231 | ATGGATAAGAAATACTCAATAGGCTTAGATATCGGCACAAATAGC |
| polynucleotide | | GTCGGATGGGCGGTGATCACTGATGATTATAAGGTTCCGTCTAA |
| sequence | | AAAGTTCAAGGTTCTGGGAAATACAGACCGCCACAGTATCAAAA |
| | | AAAATCTTATAGGGGCTCTTTTATTTGGCAGTGGAGAGACAGCG |
| | | GAAGCGACTCGTCTCAAACGGACAGCTCGTAGAAGGTATACAC |
| | | GTCGGAAGAATCGTATTTGTTATCTACAGGAGATTTTTTCAAATG |
| | | AGATGGCGAAAGTAGATGATAGTTTCTTTCATCGACTTGAAGAGT |
| | | CTTTTTTGGTGGAAGAAGACAAGAAGCATGAACGTCATCCTATTT |
| | | TTGGAAATATAGTAGATGAAGTTGCTTATCATGAGAAATATCCAA |
| | | CTATCTATCATCTGCGAAAAAAATTGGCAGATTCTACTGATAAAG |
| | | CGGATTTGCGCTTAATCTATTTGGCCTTAGCGCATATGATTAAGT |
| | | TTCGTGGTCATTTTTTGATTGAGGGAGATTTAAATCCTGATAATA |
| | | GTGATGTGGACAAACTATTTATCCAGTTGGTACAAATCTACAATC |
| | | AATTATTTGAAGAAAACCCTATTAACGCAAGTAGAGTAGATGCTA |
| | | AAGCGATTCTTTCTGCACGATTGAGTAAATCAAGACGATTAGAAA |
| | | ATCTCATTGCTCAGCTCCCCGGTGAGAAGAGAAATGGCTTGTTT |
| | | GGGAATCTCATTGCTTTGTCATTGGGATTGACCCCTAATTTTAAA |
| | | TCAAATTTTGATTTGGCAGAAGATGCTAAATTACAGCTTTCAAAA |
| | | GATACTTACGATGATGATTTAGATAATTTATTGGCGCAAATTGGA |
| | | GATCAATATGCTGATTTGTTTTTGGCAGCTAAGAATTTATCAGAT |
| | | GCTATTTTACTTTCAGATATCCTAAGAGTAAATAGTGAAATAACTA |
| | | AGGCTCCCCTATCAGCTTCAATGATTAAGCGCTACGATGAACAT |
| | | CATCAAGACTTGACTCTTTTAAAAGCTTTAGTTCGACAACAACTT |
| | | CCAGAAAAGTATAAAGAAATCTTTTTTGATCAATCAAAAAACGGA |
| | | TATGCAGGTTATATTGATGGGGGAGCTAGCCAAGAAGAATTTTA |
| | | TAAATTTATCAAACCAATTTTAGAAAAAATGGATGGTACTGAGGA |
| | | ATTATTGGTGAAACTAAATCGTGAAGATTTGCTGCGCAAGCAAC |
| | | GGACCTTTGACAACGGCTCTATTCCCCATCAAATTCACTTGGGT |
| | | GAGCTGCATGCTATTTTGAGAAGACAAGAAGACTTTTATCCATTT |
| | | TTAAAAGACAATCGTGAGAAGATTGAAAAAATCTTGACTTTTCGA |
| | | ATTCCTTATTATGTTGGTCCATTGGCGCGTGGCAATAGTCGTTTT |
| | | GCATGGATGACTCGGAAGTCTGAAGAAACAATTACCCCATGGAA |
| | | TTTTGAAGAAGTTGTCGATAAAGGTGCTTCAGCTCAATCATTTAT |
| | | TGAACGCATGACAAACTTTGATAAAAATCTTCCAAATGAAAAAGT |
| | | ACTACCAAAACATAGTTTGCTTTATGAGTATTTTACGGTTTATAAC |
| | | GAATTGACAAAGGTCAAATATGTTACTGAGGGAATGCGAAAACC |
| | | AGCATTTCTTTCAGGTGAACAGAAGAAAGCCATTGTTGATTTACT |
| | | CTTCAAAACAAATCGAAAAGTAACCGTTAAGCAATTAAAAGAAGA |
| | | TTATTTCAAAAAAATAGAATGTTTTGATAGTGTTGAAATTTCAGGA |
| | | GTTGAAGATAGATTTAATGCTTCATTAGGCGCCTACCATGATTTG |
| | | CTAAAAATTATTAAAGATAAAGATTTTTTGGATAATGAAGAAAATG |
| | | AAGATATCTTAGAGGATATTGTTTTAACATTGACCTTATTTGAAGA |
| | | TAGGGGGATGATTGAGGAAAGACTTAAAACATATGCTCACCTCT |
| | | TTGATGATAAGGTGATGAAACAGCTTAAACGTCGCCGTTATACT |
| | | GGTTGGGGACGTTTGTCTCGAAAATTGATTAATGGTATTAGGGA |
| | | TAAGCAATCTGGCAAAACAATATTAGATTTTTTGAAATCAGATGG |
| | | TTTTGCCAATCGCAATTTTATGCAGCTGATCCATGATGATAGTTT |
| | | GACATTTAAAGAAGATATTCAAAAAGCACAGGTGTCTGGACAAG |
| | | GCCATAGTTTACATGAACAGATTGCTAACTTAGCTGGCAGTCCT |
| | | GCTATTAAAAAAGGTATTTTACAGACTGTAAAAATTGTTGATGAA |
| | | CTGGTCAAAGTAATGGGGCATAAGCCAGAAAATATCGTTATTGA |
| | | AATGGCACGTGAAAATCAGACAACTCAAAAGGGCCAGAAAAATT |
| | | CGCGAGAGCGTATGAAACGAATCGAAGAAGGTATCAAAGAATTA |
| | | GGAAGTCAGATTCTTAAAGAGCATCCTGTTGAAAATACTCAATTG |
| | | CAAAATGAAAAGCTCTATCTCTATTATCTACAAAATGGAAGAGAC |
| | | ATGTATGTGGACCAAGAATTAGATATTAATCGTTTAAGTGATTAT |
| | | GATGTCGATCACATTGTTCCACAAAGTTTCATTAAAGACGATTCA |
| | | ATAGACAATAAGGTACTAACGCGTTCTGATAAAAATCGTGGTAAA |
| | | TCGGATAACGTTCCAAGTGAAGAAGTAGTCAAAAAGATGAAAAA |
| | | CTATTGGAGACAACTTCTAAACGCCAAGTTAATCACTCAACGTAA |
| | | GTTTGATAATTTAACGAAAGCTGAACGTGGAGGTTTGAGTGAAC |
| | | TTGATAAAGCTGGTTTTATCAAACGCCAATTGGTTGAAACTCGCC |
| | | AAATCACTAAGCATGTGGCACAAATTTTGGATAGTCGCATGAATA |
| | | CTAAATACGATGAAAATGATAAACTTATTCGAGAGGTTAAAGTGA |
| | | TTACCTTAAAATCTAAATTAGTTTCTGACTTCCGAAAAGATTTCCA |
| | | ATGGTCCTCATAAACTGTCCTGCCTCCACCTAGTGGTCCAGGTA |
| | | TATTTCCACAATGTTACATCAACAGGCACTTCTAGCCATTTTCCT |
| | | TCTCAAAAGGTGCAAAAAGCAACTTCATAAACACAAATTAAATCT |
| | | TCGGTGAGGTAGTGTGATGCTGCTTCCTCCCAACTCAGCGCACT |
| | | TCGTCTTCCTCATTCCACAAAAACCCATAGCCTTCCTTCACTCTG |
| | | CAGGACTAGTGCTGCCAAGGGTTCAGCTCTACCTACTGGTGTGC |
| | | TCTTTTGAGCAAGTTGCTTAGCCTCTCTGTAACACAAGGACAATA |
| | | GCTGCAAGCATCCCCAAAGATCATTGCAGGAGACAATGACTAAG |
| | | GCTACCAGAGCCGCAATAAAAGTCAGTGAATTTTAGCGTGGTCC |
| | | TCTCTGTCTCTCCAGAACGGCTGCCACGTGGAATTGCTCTTCCT |
| | | CCGCTACATCTCGGACTGGGACCTAGACCCTGGCCGCTGCTAC |
| | | CGCGTCACCTGGTTCACCTCCTGGAGCCCCTGCTACGACTGTG |
| | | CCCGACATGTGGCCGACTTTCTGCGAGGGAACCCCAACCTCAG |
| | | TCTGAGGATCTTCACCGCGCGCCTCTACTTCTGTGAGGACCGCA |
| | | AGGCTGAGCCCGAGGGGCTGCGGCGGCTGCACCGCGCCGGG |
| | | GTGCAAATAGCCATCATGACCTTCAAAGGTGCGAAAGGGCCTTC |
| | | CGCGCAGGCGCAGTGCAGCAGCCCGCATTCGGGATTGCGATG |
| | | CGGAATGAATGAGTTAGTGGGGAAGCTCGAGGGGAAGAAGTGG |
| | | GCGGGGATTCTGGTTCACCTCTGGAGCCGAAATTAAAGATTAGA |
| | | AGCAGAGAAAAGAGTGAATGGCTCAGAGACAAGGCCCCGAGGA |
| | | AATGAGAAAATGGGGCCAGGGTTGCTTCTTTCCCCTCGATTTGG |
| | | AACCTGAACTGTCTTCTACCCCCATATCCCCGCCTTTTTTTCCTT |
| | | TTTTTTTTTTTGAAGATTATTTTTACTGCTGGAATACTTTTGTAGAA |
| | | AACCACGAAAGAACTTTCAAAGCCTGGGAAGGGCTGCATGAAAA |
| | | TTCAGTTCGTCTCTCCAGACAGCTTCGGCGCATCCTTTTGGTAA |
| | | GGGGCTTCCTCGCTTTTTAAATTTTCTTTCTTTCTCTACAGTCTTT |
| | | TTTGGAGTTTCGTATATTTCTTATATTTTCTTATTGTTCAATCACTC |
| | | TCAGTTTTCATCTGATGAAAACTTTATTTCTCCTCCACATCAGCTT |
| | | TTTCTTCTGCTGTTTCACCATTCAGAGCCCTCTGCTAAGGTTCCT |
| | | TTTCCCTCCCTTTTCTTTCTTTTGTTGTTTCACATCTTTAAATTTCT |
| | | GTCTCTCCCCAGGGTTGCGTTTCCTTCCTGGTCAGAATTCTTTTC |
| | | TCCTTTTTTTTTTTTTTTTTTTTTTTTTTTAAACAAACAAACAAAAAA |
| | | CCCAAAAAAACTCTTTCCCAATTTACTTTCTTCCAACATGTTACAA |
| | | AGCCATCCACTCAGTTTAGAAGACTCTCCGGCCCCACCGACCCC |
| | | CAACCTCGTTTTGAAGCCATTCACTCAATTTGCTTCTCTCTTTCT |
| | | CTACAGCCCCTGTATGAGGTTGATGACTTACGAGACGCATTTCG |
| | | TACTTTGGGACTTTGATAGCAACTTCCAGGAATGTCACACACGAT |
| | | GAAATATCTCTGCTGAAGACAGTGGATAAAAAACAGTCCTTCAA |
| | | GTCTTCTCTGTTTTTATTCTTCAACTCTCACTTTCTTAGAGTTTAC |
| | | AGAAAAAATATTTATATACGACTCTTTAAAAAGATCTATGTCTTGA |
| | | AAATAGAGAAGGAACACAGGTCTGGCCAGGGACGTGCTGCAAT |
| | | ATTCTATAAAGTACGTGAGATTAACAATTACCATCATGCCCATGA |
| | | TGCGTATCTAAATGCCGTCGTTGGAACTGCTTTGATTAAGAAATA |
| | | TCCAAAACTTGAATCGGAGTTTGTCTATGGTGATTATAAAGTTTA |
| | | TGATGTTCGTAAAATGATTGCTAAGTCTGAGCAAGAAATAGGCAA |
| | | AGCAACCGCAAAATATTTCTTTTACTCTAATATCATGAACTTCTTC |
| | | AAAACAGAAATTACACTTGCAAATGGAGAGATTCGCAAACGCCC |
| | | TCTAATCGAAACTAATGGGGAAACTGGAGAAATTGTCTGGGATA |
| | | AAGGGCGAGATTTTGCCACAGTGCGCAAAGTATTGTCCATGCCC |
| | | CAAGTCAATATTGTCAAGAAAACAGAAGTACAGACAGGCGGATT |
| | | CTCCAAGGAGTCAATTTTACCAAAAAGAAATTCGGACAAGCTTAT |
| | | TGCTCGTAAAAAAGACTGGGATCCAAAAAAATATGGTGGTTTTGA |
| | | TAGTCCAACGGTAGCTTATTCAGTCCTAGTGGTTGCTAAGGTGG |
| | | AAAAAGGGAAATCGAAGAAGTTAAAATCCGTTAAAGAGTTACTAG |
| | | GGATCACAATTATGGAAAGAAGTTCCTTTGAAAAAAATCCGATTG |
| | | ACTTTTTAGAAGCTAAAGGATATAAGGAAGTTAAAAAAGACTTAA |
| | | TCATTAAACTACCTAAATATAGTCTTTTTGAGTTAGAAAACGGTC |
| | | GTAAACGGATGCTGGCTAGTGCCGGAGAATTACAAAAAGGAAAT |
| | | GAGCTGGCTCTGCCAAGCAAATATGTGAATTTTTTATATTTAGCT |
| | | AGTCATTATGAAAAGTTGAAGGGTAGTCCAGAAGATAACGAACA |
| | | AAAACAATTGTTTGTGGAGCAGCATAAGCATTATTTAGATGAGAT |
| | | TATTGAGCAAATCAGTGAATTTTCTAAGCGTGTTATTTTAGCAGA |
| | | TGCCAATTTAGATAAAGTTCTTAGTGCATATAACAAACATAGAGA |
| | | CAAACCAATACGTGAACAAGCAGAAAATATTATTCATTTATTTAC |
| | | GTTGACGAATCTTGGAGCTCCCGCTGCTTTTAAATATTTTGATAC |
| | | AACAATTGATCGTAAACGATATACGTCTACAAAAGAAGTTTTAGA |
| | | TGCCACTCTTATCCATCAATCCATCACTGGTCTTTATGAAACACG |
| | | CATTGATTTGAGTCAGCTAGGAGGTGACTGA |
| spCas9 polypeptide | 232 | MDKKYSIGLDIGTNSVGWAVITDDYKVPSKKFKVLGNTDRHSIKKNL |
| sequence | | IGALLFGSGETAEATRLKRTARRRYTRRKNRICYLQEIFSNEMAKVD |
| | | DSFFHRLEESFLVEEDKKHERHPIFGNIVDEVAYHEKYPTIYHLRKK |
| | | LADSTDKADLRLIYLALAHMIKFRGHFLIEGDLNPDNSDVDKLFIQLV |
| | | QIYNQLFEENPINASRVDAKAILSARLSKSRRLENLIAQLPGEKRNGL |
| | | FGNLIALSLGLTPNFKSNFDLAEDAKLQLSKDTYDDDLDNLLAQIGD |
| | | QYADLFLAAKNLSDAILLSDILRVNSEITKAPLSASMIKRYDEHHQDL |
| | | TLLKALVRQQLPEKYKEIFFDQSKNGYAGYIDGGASQEEFYKFIKPIL |
| | | EKMDGTEELLVKLNREDLLRKQRTFDNGSIPHQIHLGELHAILRRQE |
| | | DFYPFLKDNREKIEKILTFRIPYYVGPLARGNSRFAWMTRKSEETITP |
| | | WNFEEVVDKGASAQSFIERMTNFDKNLPNEKVLPKHSLLYEYFTVY |
| | | NELTKVKYVTEGMRKPAFLSGEQKKAIVDLLFKTNRKVTVKQLKED |
| | | YFKKIECFDSVEISGVEDRFNASLGAYHDLLKIIKDKDFLDNEENEDI |
| | | LEDIVLTLTLFEDRGMIEERLKTYAHLFDDKVMKQLKRRRYTGWGR |
| | | LSRKLINGIRDKQSGKTILDFLKSDGFANRNFMQLIHDDSLTFKEDIQ |
| | | KAQVSGQGHSLHEQIANLAGSPAIKKGILQTVKIVDELVKVMGHKPE |
| | | NIVIEMARENQTTQKGQKNSRERMKRIEEGIKELGSQILKEHPVENT |
| | | QLQNEKLYLYYLQNGRDMYVDQELDINRLSDYDVDHIVPQSFIKDD |
| | | SIDNKVLTRSDKNRGKSDNVPSEEVVKKMKNYWRQLLNAKLITQRK |
| | | FDNLTKAERGGLSELDKAGFIKRQLVETRQITKHVAQILDSRMNTKY |
| | | DENDKLIREVKVITLKSKLVSDFRKDFQFYKVREINNYHHAHDAYLN |
| | | AVVGTALIKKYPKLESEFVYGDYKVYDVRKMIAKSEQEIGKATAKYF |
| | | FYSNIMNFFKTEITLANGEIRKRPLIETNGETGEIVWDKGRDFATVRK |
| | | VLSMPQVNIVKKTEVQTGGFSKESILPKRNSDKLIARKKDWDPKKY |
| | | GGFDSPTVAYSVLVVAKVEKGKSKKLKSVKELLGITIMERSSFEKNP |
| | | IDFLEAKGYKEVKKDLIIKLPKYSLFELENGRKRMLASAGELQKGNE |
| | | LALPSKYVNFLYLASHYEKLKGSPEDNEQKQLFVEQHKHYLDEIIEQ |
| | | ISEFSKRVILADANLDKVLSAYNKHRDKPIREQAENIIHLFTLTNLGAP |
| | | AAFKYFDTTIDRKRYTSTKEVLDATLIHQSITGLYETRIDLSQLGGD |
| wild-type Cas9 | 235 | ATGGATAAAAAGTATTCTATTGGTTTAGACATCGGCACTAATTCC |
| polynucleotide | | GTTGGATGGGCTGTCATAACCGATGAATACAAAGTACCTTCAAA |
| sequence | | GAAATTTAAGGTGTTGGGGAACACAGACCGTCATTCGATTAAAA |
| | | AGAATCTTATCGGTGCCCTCCTATTCGATAGTGGCGAAACGGCA |
| | | GAGGCGACTCGCCTGAAACGAACCGCTCGGAGAAGGTATACAC |
| | | GTCGCAAGAACCGAATATGTTACTTACAAGAAATTTTTAGCAATG |
| | | AGATGGCCAAAGTTGACGATTCTTTCTTTCACCGTTTGGAAGAGT |
| | | CCTTCCTTGTCGAAGAGGACAAGAAACATGAACGGCACCCCATC |
| | | TTTGGAAACATAGTAGATGAGGTGGCATATCATGAAAAGTACCC |
| | | AACGATTTATCACCTCAGAAAAAAGCTAGTTGACTCAACTGATAA |
| | | AGCGGACCTGAGGTTAATCTACTTGGCTCTTGCCCATATGATAA |
| | | AGTTCCGTGGGCACTTTCTCATTGAGGGTGATCTAAATCCGGAC |
| | | AACTCGGATGTCGACAAACTGTTCATCCAGTTAGTACAAACCTAT |
| | | AATCAGTTGTTTGAAGAGAACCCTATAAATGCAAGTGGCGTGGA |
| | | TGCGAAGGCTATTCTTAGCGCCCGCCTCTCTAAATCCCGACGGC |
| | | TAGAAAACCTGATCGCACAATTACCCGGAGAGAAGAAAAATGGG |
| | | TTGTTCGGTAACCTTATAGCGCTCTCACTAGGCCTGACACCAAA |
| | | TTTTAAGTCGAACTTCGACTTAGCTGAAGATGCCAAATTGCAGCT |
| | | TAGTAAGGACACGTACGATGACGATCTCGACAATCTACTGGCAC |
| | | AAATTGGAGATCAGTATGCGGACTTATTTTTGGCTGCCAAAAACC |
| | | TTAGCGATGCAATCCTCCTATCTGACATACTGAGAGTTAATACTG |
| | | AGATTACCAAGGCGCCGTTATCCGCTTCAATGATCAAAAGGTAC |
| | | GATGAACATCACCAAGACTTGACACTTCTCAAGGCCCTAGTCCG |
| | | TCAGCAACTGCCTGAGAAATATAAGGAAATATTCTTTGATCAGTC |
| | | GAAAAACGGGTACGCAGGTTATATTGACGGCGGAGCGAGTCAA |
| | | GAGGAATTCTACAAGTTTATCAAACCCATATTAGAGAAGATGGAT |
| | | GGGACGGAAGAGTTGCTTGTAAAACTCAATCGCGAAGATCTACT |
| | | GCGAAAGCAGCGGACTTTCGACAACGGTAGCATTCCACATCAAA |
| | | TCCACTTAGGCGAATTGCATGCTATACTTAGAAGGCAGGAGGAT |
| | | TTTTATCCGTTCCTCAAAGACAATCGTGAAAAGATTGAGAAAATC |
| | | CTAACCTTTCGCATACCTTACTATGTGGGACCCCTGGCCCGAGG |
| | | GAACTCTCGGTTCGCATGGATGACAAGAAAGTCCGAAGAAACGA |
| | | TTACTCCATGGAATTTTGAGGAAGTTGTCGATAAAGGTGCGTCA |
| | | GCTCAATCGTTCATCGAGAGGATGACCAACTTTGACAAGAATTTA |
| | | CCGAACGAAAAAGTATTGCCTAAGCACAGTTTACTTTACGAGTAT |
| | | TTCACAGTGTACAATGAACTCACGAAAGTTAAGTATGTCACTGAG |
| | | GGCATGCGTAAACCCGCCTTTCTAAGCGGAGAACAGAAGAAAG |
| | | CAATAGTAGATCTGTTATTCAAGACCAACCGCAAAGTGACAGTTA |
| | | AGCAATTGAAAGAGGACTACTTTAAGAAAATTGAATGCTTCGATT |
| | | CTGTCGAGATCTCCGGGGTAGAAGATCGATTTAATGCGTCACTT |
| | | GGTACGTATCATGACCTCCTAAAGATAATTAAAGATAAGGACTTC |
| | | CTGGATAACGAAGAGAATGAAGATATCTTAGAAGATATAGTGTTG |
| | | ACTCTTACCCTCTTTGAAGATCGGGAAATGATTGAGGAAAGACT |
| | | AAAAACATACGCTCACCTGTTCGACGATAAGGTTATGAAACAGTT |
| | | AAAGAGGCGTCGCTATACGGGCTGGGGACGATTGTCGCGGAAA |
| | | CTTATCAACGGGATAAGAGACAAGCAAAGTGGTAAAACTATTCT |
| | | CGATTTTCTAAAGAGCGACGGCTTCGCCAATAGGAACTTTATGC |
| | | AGCTGATCCATGATGACTCTTTAACCTTCAAAGAGGATATACAAA |
| | | AGGCACAGGTTTCCGGACAAGGGGACTCATTGCACGAACATATT |
| | | GCGAATCTTGCTGGTTCGCCAGCCATCAAAAAGGGCATACTCCA |
| | | GACAGTCAAAGTAGTGGATGAGCTAGTTAAGGTCATGGGACGTC |
| | | ACAAACCGGAAAACATTGTAATCGAGATGGCACGCGAAAATCAA |
| | | ACGACTCAGAAGGGGCAAAAAAACAGTCGAGAGCGGATGAAGA |
| | | GAATAGAAGAGGGTATTAAAGAACTGGGCAGCCAGATCTTAAAG |
| | | GAGCATCCTGTGGAAAATACCCAATTGCAGAACGAGAAACTTTA |
| | | CCTCTATTACCTACAAAATGGAAGGGACATGTATGTTGATCAGG |
| | | AACTGGACATAAACCGTTTATCTGATTACGACGTCGATCACATTG |
| | | TACCCCAATCCTTTTTGAAGGACGATTCAATCGACAATAAAGTGC |
| | | TTACACGCTCGGATAAGAACCGAGGGAAAAGTGACAATGTTCCA |
| | | AGCGAGGAAGTCGTAAAGAAAATGAAGAACTATTGGCGGCAGCT |
| | | CCTAAATGCGAAACTGATAACGCAAAGAAAGTTCGATAACTTAAC |
| | | TAAAGCTGAGAGGGGTGGCTTGTCTGAACTTGACAAGGCCGGA |
| | | TTTATTAAACGTCAGCTCGTGGAAACCCGCCAAATCACAAAGCA |
| | | TGTTGCACAGATACTAGATTCCCGAATGAATACGAAATACGACG |
| | | AGAACGATAAGCTGATTCGGGAAGTCAAAGTAATCACTTTAAAGT |
| | | CAAAATTGGTGTCGGACTTCAGAAAGGATTTTCAATTCTATAAAG |
| | | TTAGGGAGATAAATAACTACCACCATGCGCACGACGCTTATCTT |
| | | AATGCCGTCGTAGGGACCGCACTCATTAAGAAATACCCGAAGCT |
| | | AGAAAGTGAGTTTGTGTATGGTGATTACAAAGTTTATGACGTCCG |
| | | TAAGATGATCGCGAAAAGCGAACAGGAGATAGGCAAGGCTACA |
| | | GCCAAATACTTCTTTTATTCTAACATTATGAATTTCTTTAAGACGG |
| | | AAATCACTCTGGCAAACGGAGAGATACGCAAACGACCTTTAATT |
| | | GAAACCAATGGGGAGACAGGTGAAATCGTATGGGATAAGGGCC |
| | | GGGACTTCGCGACGGTGAGAAAAGTTTTGTCCATGCCCCAAGTC |
| | | AACATAGTAAAGAAAACTGAGGTGCAGACCGGAGGGTTTTCAAA |
| | | GGAATCGATTCTTCCAAAAAGGAATAGTGATAAGCTCATCGCTC |
| | | GTAAAAAGGACTGGGACCCGAAAAAGTACGGTGGCTTCGATAG |
| | | CCCTACAGTTGCCTATTCTGTCCTAGTAGTGGCAAAAGTTGAGA |
| | | AGGGAAAATCCAAGAAACTGAAGTCAGTCAAAGAATTATTGGGG |
| | | ATAACGATTATGGAGCGCTCGTCTTTTGAAAAGAACCCCATCGA |
| | | CTTCCTTGAGGCGAAAGGTTACAAGGAAGTAAAAAAGGATCTCA |
| | | TAATTAAACTACCAAAGTATAGTCTGTTTGAGTTAGAAAATGGCC |
| | | GAAAACGGATGTTGGCTAGCGCCGGAGAGCTTCAAAAGGGGAA |
| | | CGAACTCGCACTACCGTCTAAATACGTGAATTTCCTGTATTTAGC |
| | | GTCCCATTACGAGAAGTTGAAAGGTTCACCTGAAGATAACGAAC |
| | | AGAAGCAACTTTTTGTTGAGCAGCACAAACATTATCTCGACGAAA |
| | | TCATAGAGCAAATTTCGGAATTCAGTAAGAGAGTCATCCTAGCT |
| | | GATGCCAATCTGGACAAAGTATTAAGCGCATACAACAAGCACAG |
| | | GGATAAACCCATACGTGAGCAGGCGGAAAATATTATCCATTTGT |
| | | TTACTCTTACCAACCTCGGCGCTCCAGCCGCATTCAAGTATTTTG |
| | | ACACAACGATAGATCGCAAACGATACACTTCTACCAAGGAGGTG |
| | | CTAGACGCGACACTGATTCACCAATCCATCACGGGATTATATGA |
| | | AACTCGGATAGATTTGTCACAGCTTGGGGGTGACGGATCCCCCA |
| | | AGAAGAAGAGGAAAGTCTCGAGCGACTACAAAGACCATGACGG |
| | | TGATTATAAAGATCATGACATCGATTACAAGGATGACGATGACAA |
| | | GGCTGCAGGA |
| wild-type Cas9 | 236 | MDKKYSIGLAIGTNSVGWAVITDEYKVPSKKFKVLGNTDRHSIKKNLI |
| polypeptide | | GALLFDSGETAEATRLKRTARRRYTRRKNRICYLQEIFSNEMAKVD |
| sequence | | DSFFHRLEESFLVEEDKKHERHPIFGNIVDEVAYHEKYPTIYHLRKK |
| | | LVDSTDKADLRLIYLALAHMIKFRGHFLIEGDLNPDNSDVDKLFIQLV |
| | | QTYNQLFEENPINASGVDAKAILSARLSKSRRLENLIAQLPGEKKNG |
| | | LFGNLIALSLGLTPNFKSNFDLAEDAKLQLSKDTYDDDLDNLLAQIG |
| | | DQYADLFLAAKNLSDAILLSDILRVNTEITKAPLSASMIKRYDEHHQD |
| | | LTLLKALVRQQLPEKYKEIFFDQSKNGYAGYIDGGASQEEFYKFIKPI |
| | | LEKMDGTEELLVKLNREDLLRKQRTFDNGSIPHQIHLGELHAILRRQ |
| | | EDFYPFLKDNREKIEKILTFRIPYYVGPLARGNSRFAWMTRKSEETIT |
| | | PWNFEEVVDKGASAQSFIERMTNFDKNLPNEKVLPKHSLLYEYFTV |
| | | YNELTKVKYVTEGMRKPAFLSGEQKKAIVDLLFKTNRKVTVKQLKE |
| | | DYFKKIECFDSVEISGVEDRFNASLGTYHDLLKIIKDKDFLDNEENED |
| | | ILEDIVLTLTLFEDREMIEERLKTYAHLFDDKVMKQLKRRRYTGWGR |
| | | LSRKLINGIRDKQSGKTILDFLKSDGFANRNFMQLIHDDSLTFKEDIQ |
| | | KAQVSGQGDSLHEHIANLAGSPAIKKGILQTVKVVDELVKVMGRHK |
| | | PENIVIEMARENQTTQKGQKNSRERMKRIEEGIKELGSQILKEHPVE |
| | | NTQLQNEKLYLYYLQNGRDMYVDQELDINRLSDYDVDHIVPQSFLK |
| | | DDSIDNKVLTRSDKNRGKSDNVPSEEVVKKMKNYWRQLLNAKLITQ |
| | | RKFDNLTKAERGGLSELDKAGFIKRQLVETRQITKHVAQILDSRMNT |
| | | KYDENDKLIREVKVITLKSKLVSDFRKDFQFYKVREINNYHHAHDAY |
| | | LNAVVGTALIKKYPKLESEFVYGDYKVYDVRKMIAKSEQEIGKATAK |
| | | YFFYSNIMNFFKTEITLANGEIRKRPLIETNGETGEIVWDKGRDFATV |
| | | RKVLSMPQVNIVKKTEVQTGGFSKESILPKRNSDKLIARKKDWDPK |
| | | KYGGFDSPTVAYSVLVVAKVEKGKSKKLKSVKELLGITIMERSSFEK |
| | | NPIDFLEAKGYKEVKKDLIIKLPKYSLFELENGRKRMLASAGELQKG |
| | | NELALPSKYVNFLYLASHYEKLKGSPEDNEQKQLFVEQHKHYLDEII |
| | | EQISEFSKRVILADANLDKVLSAYNKHRDKPIREQAENIIHLFTLTNLG |
| | | APAAFKYFDTTIDRKRYTSTKEVLDATLIHQSITGLYETRIDLSQLGG |
| | | D |
| Cas9 from | 237 | ATGGATAAGAAATACTCAATAGGCTTAGATATCGGCACAAATAGC |
| Streptococcus | | GTCGGATGGGCGGTGATCACTGATGAATATAAGGTTCCGTCTAA |
| pyogenes (NCBI | | AAAGTTCAAGGTTCTGGGAAATACAGACCGCCACAGTATCAAAA |
| Ref. Seq .: | | AAAATCTTATAGGGGCTCTTTTATTTGACAGTGGAGAGACAGCG |
| NC_002737.2) | | GAAGCGACTCGTCTCAAACGGACAGCTCGTAGAAGGTATACAC |
| polynucleotide | | GTCGGAAGAATCGTATTTGTTATCTACAGGAGATTTTTTCAAATG |
| sequence | | AGATGGCGAAAGTAGATGATAGTTTCTTTCATCGACTTGAAGAGT |
| | | CTTTTTTGGTGGAAGAAGACAAGAAGCATGAACGTCATCCTATTT |
| | | TTGGAAATATAGTAGATGAAGTTGCTTATCATGAGAAATATCCAA |
| | | CTATCTATCATCTGCGAAAAAAATTGGTAGATTCTACTGATAAAG |
| | | CGGATTTGCGCTTAATCTATTTGGCCTTAGCGCATATGATTAAGT |
| | | TTCGTGGTCATTTTTTGATTGAGGGAGATTTAAATCCTGATAATA |
| | | GTGATGTGGACAAACTATTTATCCAGTTGGTACAAACCTACAATC |
| | | AATTATTTGAAGAAAACCCTATTAACGCAAGTGGAGTAGATGCTA |
| | | AAGCGATTCTTTCTGCACGATTGAGTAAATCAAGACGATTAGAAA |
| | | ATCTCATTGCTCAGCTCCCCGGTGAGAAGAAAAATGGCTTATTT |
| | | GGGAATCTCATTGCTTTGTCATTGGGTTTGACCCCTAATTTTAAA |
| | | TCAAATTTTGATTTGGCAGAAGATGCTAAATTACAGCTTTCAAAA |
| | | GATACTTACGATGATGATTTAGATAATTTATTGGCGCAAATTGGA |
| | | GATCAATATGCTGATTTGTTTTTGGCAGCTAAGAATTTATCAGAT |
| | | GCTATTTTACTTTCAGATATCCTAAGAGTAAATACTGAAATAACTA |
| | | AGGCTCCCCTATCAGCTTCAATGATTAAACGCTACGATGAACAT |
| | | CATCAAGACTTGACTCTTTTAAAAGCTTTAGTTCGACAACAACTT |
| | | CCAGAAAAGTATAAAGAAATCTTTTTTGATCAATCAAAAAACGGA |
| | | TATGCAGGTTATATTGATGGGGGAGCTAGCCAAGAAGAATTTTA |
| | | TAAATTTATCAAACCAATTTTAGAAAAAATGGATGGTACTGAGGA |
| | | ATTATTGGTGAAACTAAATCGTGAAGATTTGCTGCGCAAGCAAC |
| | | GGACCTTTGACAACGGCTCTATTCCCCATCAAATTCACTTGGGT |
| | | GAGCTGCATGCTATTTTGAGAAGACAAGAAGACTTTTATCCATTT |
| | | TTAAAAGACAATCGTGAGAAGATTGAAAAAATCTTGACTTTTCGA |
| | | ATTCCTTATTATGTTGGTCCATTGGCGCGTGGCAATAGTCGTTTT |
| | | GCATGGATGACTCGGAAGTCTGAAGAAACAATTACCCCATGGAA |
| | | TTTTGAAGAAGTTGTCGATAAAGGTGCTTCAGCTCAATCATTTAT |
| | | TGAACGCATGACAAACTTTGATAAAAATCTTCCAAATGAAAAAGT |
| | | ACTACCAAAACATAGTTTGCTTTATGAGTATTTTACGGTTTATAAC |
| | | GAATTGACAAAGGTCAAATATGTTACTGAAGGAATGCGAAAACC |
| | | AGCATTTCTTTCAGGTGAACAGAAGAAAGCCATTGTTGATTTACT |
| | | CTTCAAAACAAATCGAAAAGTAACCGTTAAGCAATTAAAAGAAGA |
| | | TTATTTCAAAAAAATAGAATGTTTTGATAGTGTTGAAATTTCAGGA |
| | | GTTGAAGATAGATTTAATGCTTCATTAGGTACCTACCATGATTTG |
| | | CTAAAAATTATTAAAGATAAAGATTTTTTGGATAATGAAGAAAATG |
| | | AAGATATCTTAGAGGATATTGTTTTAACATTGACCTTATTTGAAGA |
| | | TAGGGAGATGATTGAGGAAAGACTTAAAACATATGCTCACCTCTT |
| | | TGATGATAAGGTGATGAAACAGCTTAAACGTCGCCGTTATACTG |
| | | GTTGGGGACGTTTGTCTCGAAAATTGATTAATGGTATTAGGGATA |
| | | AGCAATCTGGCAAAACAATATTAGATTTTTTGAAATCAGATGGTT |
| | | TTGCCAATCGCAATTTTATGCAGCTGATCCATGATGATAGTTTGA |
| | | CATTTAAAGAAGACATTCAAAAAGCACAAGTGTCTGGACAAGGC |
| | | GATAGTTTACATGAACATATTGCAAATTTAGCTGGTAGCCCTGCT |
| | | ATTAAAAAAGGTATTTTACAGACTGTAAAAGTTGTTGATGAATTG |
| | | GTCAAAGTAATGGGGCGGCATAAGCCAGAAAATATCGTTATTGA |
| | | AATGGCACGTGAAAATCAGACAACTCAAAAGGGCCAGAAAAATT |
| | | CGCGAGAGCGTATGAAACGAATCGAAGAAGGTATCAAAGAATTA |
| | | GGAAGTCAGATTCTTAAAGAGCATCCTGTTGAAAATACTCAATTG |
| | | CAAAATGAAAAGCTCTATCTCTATTATCTCCAAAATGGAAGAGAC |
| | | ATGTATGTGGACCAAGAATTAGATATTAATCGTTTAAGTGATTAT |
| | | GATGTCGATCACATTGTTCCACAAAGTTTCCTTAAAGACGATTCA |
| | | ATAGACAATAAGGTCTTAACGCGTTCTGATAAAAATCGTGGTAAA |
| | | TCGGATAACGTTCCAAGTGAAGAAGTAGTCAAAAAGATGAAAAA |
| | | CTATTGGAGACAACTTCTAAACGCCAAGTTAATCACTCAACGTAA |
| | | GTTTGATAATTTAACGAAAGCTGAACGTGGAGGTTTGAGTGAAC |
| | | TTGATAAAGCTGGTTTTATCAAACGCCAATTGGTTGAAACTCGCC |
| | | AAATCACTAAGCATGTGGCACAAATTTTGGATAGTCGCATGAATA |
| | | CTAAATACGATGAAAATGATAAACTTATTCGAGAGGTTAAAGTGA |
| | | TTACCTTAAAATCTAAATTAGTTTCTGACTTCCGAAAAGATTTCCA |
| | | ATTCTATAAAGTACGTGAGATTAACAATTACCATCATGCCCATGA |
| | | TGCGTATCTAAATGCCGTCGTTGGAACTGCTTTGATTAAGAAATA |
| | | TCCAAAACTTGAATCGGAGTTTGTCTATGGTGATTATAAAGTTTA |
| | | TGATGTTCGTAAAATGATTGCTAAGTCTGAGCAAGAAATAGGCAA |
| | | AGCAACCGCAAAATATTTCTTTTACTCTAATATCATGAACTTCTTC |
| | | AAAACAGAAATTACACTTGCAAATGGAGAGATTCGCAAACGCCC |
| | | TCTAATCGAAACTAATGGGGAAACTGGAGAAATTGTCTGGGATA |
| | | AAGGGCGAGATTTTGCCACAGTGCGCAAAGTATTGTCCATGCCC |
| | | CAAGTCAATATTGTCAAGAAAACAGAAGTACAGACAGGCGGATT |
| | | CTCCAAGGAGTCAATTTTACCAAAAAGAAATTCGGACAAGCTTAT |
| | | TGCTCGTAAAAAAGACTGGGATCCAAAAAAATATGGTGGTTTTGA |
| | | TAGTCCAACGGTAGCTTATTCAGTCCTAGTGGTTGCTAAGGTGG |
| | | AAAAAGGGAAATCGAAGAAGTTAAAATCCGTTAAAGAGTTACTAG |
| | | GGATCACAATTATGGAAAGAAGTTCCTTTGAAAAAAATCCGATTG |
| | | ACTTTTTAGAAGCTAAAGGATATAAGGAAGTTAAAAAAGACTTAA |
| | | TCATTAAACTACCTAAATATAGTCTTTTTGAGTTAGAAAACGGTC |
| | | GTAAACGGATGCTGGCTAGTGCCGGAGAATTACAAAAAGGAAAT |
| | | GAGCTGGCTCTGCCAAGCAAATATGTGAATTTTTTATATTTAGCT |
| | | AGTCATTATGAAAAGTTGAAGGGTAGTCCAGAAGATAACGAACA |
| | | AAAACAATTGTTTGTGGAGCAGCATAAGCATTATTTAGATGAGAT |
| | | TATTGAGCAAATCAGTGAATTTTCTAAGCGTGTTATTTTAGCAGA |
| | | TGCCAATTTAGATAAAGTTCTTAGTGCATATAACAAACATAGAGA |
| | | CAAACCAATACGTGAACAAGCAGAAAATATTATTCATTTATTTAC |
| | | GTTGACGAATCTTGGAGCTCCCGCTGCTTTTAAATATTTTGATAC |
| | | AACAATTGATCGTAAACGATATACGTCTACAAAAGAAGTTTTAGA |
| | | TGCCACTCTTATCCATCAATCCATCACTGGTCTTTATGAAACACG |
| | | CATTGATTTGAGTCAGCTAGGAGGTGACTGA |
| catalytically | 238 | MDKKYSIGLAIGTNSVGWAVITDEYKVPSKKFKVLGNTDRHSIKKNLI |
| inactive | | GALLFDSGETAEATRLKRTARRRYTRRKNRICYLQEIFSNEMAKVD |
| Cas9 (dCas9) | | DSFFHRLEESFLVEEDKKHERHPIFGNIVDEVAYHEKYPTIYHLRKK |
| polypeptide | | LVDSTDKADLRLIYLALAHMIKFRGHFLIEGDLNPDNSDVDKLFIQLV |
| sequence | | QTYNQLFEENPINASGVDAKAILSARLSKSRRLENLIAQLPGEKKNG |
| | | LFGNLIALSLGLTPNFKSNFDLAEDAKLQLSKDTYDDDLDNLLAQIG |
| | | DQYADLFLAAKNLSDAILLSDILRVNTEITKAPLSASMIKRYDEHHQD |
| | | LTLLKALVRQQLPEKYKEIFFDQSKNGYAGYIDGGASQEEFYKFIKPI |
| | | LEKMDGTEELLVKLNREDLLRKQRTFDNGSIPHQIHLGELHAILRRQ |
| | | EDFYPFLKDNREKIEKILTFRIPYYVGPLARGNSRFAWMTRKSEETIT |
| | | PWNFEEVVDKGASAQSFIERMTNFDKNLPNEKVLPKHSLLYEYFTV |
| | | YNELTKVKYVTEGMRKPAFLSGEQKKAIVDLLFKTNRKVTVKQLKE |
| | | DYFKKIECFDSVEISGVEDRFNASLGTYHDLLKIIKDKDFLDNEENED |
| | | ILEDIVLTLTLFEDREMIEERLKTYAHLFDDKVMKQLKRRRYTGWGR |
| | | LSRKLINGIRDKQSGKTILDFLKSDGFANRNFMQLIHDDSLTFKEDIQ |
| | | KAQVSGQGDSLHEHIANLAGSPAIKKGILQTVKVVDELVKVMGRHK |
| | | PENIVIEMARENQTTQKGQKNSRERMKRIEEGIKELGSQILKEHPVE |
| | | NTQLQNEKLYLYYLQNGRDMYVDQELDINRLSDYDVDAIVPQSFLK |
| | | DDSIDNKVLTRSDKNRGKSDNVPSEEVVKKMKNYWRQLLNAKLITQ |
| | | RKFDNLTKAERGGLSELDKAGFIKRQLVETRQITKHVAQILDSRMNT |
| | | KYDENDKLIREVKVITLKSKLVSDFRKDFQFYKVREINNYHHAHDAY |
| | | LNAVVGTALIKKYPKLESEFVYGDYKVYDVRKMIAKSEQEIGKATAK |
| | | YFFYSNIMNFFKTEITLANGEIRKRPLIETNGETGEIVWDKGRDFATV |
| | | RKVLSMPQVNIVKKTEVQTGGFSKESILPKRNSDKLIARKKDWDPK |
| | | KYGGFDSPTVAYSVLVVAKVEKGKSKKLKSVKELLGITIMERSSFEK |
| | | NPIDFLEAKGYKEVKKDLIIKLPKYSLFELENGRKRMLASAGELQKG |
| | | NELALPSKYVNFLYLASHYEKLKGSPEDNEQKQLFVEQHKHYLDEII |
| | | EQISEFSKRVILADANLDKVLSAYNKHRDKPIREQAENIIHLFTLTNLG |
| | | APAAFKYFDTTIDRKRYTSTKEVLDATLIHQSITGLYETRIDLSQLGG |
| | | D |
| tr\|F0NN87\|F0NN87_ | 239 | MEVPLYNIFGDNYIIQVATEAENSTIYNNKVEIDDEELRNVLNLAYKIA |
| SULIHCRISPR- | | KNNEDAAAERRGKAKKKKGEEGETTTSNIILPLSGNDKNPWTETLK |
| associatedCasx | | CYNFPTTVALSEVFKNFSQVKECEEVSAPSFVKPEFYEFGRSPGM |
| protein OS = | | VERTRRVKLEVEPHYLIIAAAGWWLTRLGKAKVSEGDYVGVNVFTP |
| Sulfolobus | | TRGILYSLIQNVNGIVPGIKPETAFGLWIARKVVSSVTNPNVSVVRIY |
| islandicus (strain | | TISDAVGQNPTTINGGFSIDLTKLLEKRYLLSERLEAIARNALSISSNM |
| HVE10/4) GN = | | RERYIVLANYIYEYLTG SKRLEDLLYFANRDLIMNLNSDDGKVRDLK |
| SIH_0402 PE = 4 | | LISAYVNGELIRGEG |
| SV=1); CasX | | |
| polypeptide | | |
| sequence | | |
| tr\|F0NH53\|F0NH53_ | 240 | MEVPLYNIFGDNYIIQVATEAENSTIYNNKVEIDDEELRNVLNLAYKIA |
| SULIR CRISPR | | KNNEDAAAERRGKAKKKKGEEGETTTSNIILPLSGNDKNPWTETLK |
| associated protein, | | CYNFPTTVALSEVFKNFSQVKECEEVSAPSFVKPEFYKFGRSPGM |
| Casx OS = | | VERTRRVKLEVEPHYLIMAAAGWWLTRLGKAKVSEGDYVGVNVFT |
| Sulfolobus | | PTRGILYSLIQNVNGIVPGIKPETAFGLWIARKVVSSVTNPNVSVVSI |
| islandicus (strain | | YTISDAVGQNPTTINGGFSIDLTKLLEKRDLLSERLEAIARNALSISSN |
| REY15A) | | MRERYIVLANYIYEYLTGSKRLEDLLYFANRDLIMNLNSDDGKVRDL |
| GN = SiRe_0771 | | KLISAYVNGELIRGEG |
| PE = 4 SV = 1); | | |
| CasX polypeptide | | |
| sequence | | |
| CasX polypeptide | 241 | MEKRINKIRKKLSADNATKPVSRSGPMKTLLVRVMTDDLKKRLEKR |
| sequence | | RKKPEVMPQVISNNAANNLRMLLDDYTKMKEAILQVYWQEFKDDH |
| | | VGLMCKFAQPASKKIDQNKLKPEMDEKGNLTTAGFACSQCGQPLF |
| | | VYKLEQVSEKGKAYTNYFGRCNVAEHEKLILLAQLKPVKDSDEAVT |
| | | YSLGKFGQRALDFYSIHVTKESTHPVKPLAQIAGNRYASGPVGKAL |
| | | SDACMGTIASFLSKYQDIIIEHQKVVKGNQKRLESLRELAGKENLEY |
| | | PSVTLPPQPHTKEGVDFAYNEVIARVRMWNLNLWQKLKLSRDDA |
| | | KPLLRLKGFPSFPVVERRENEVDWWNTINEVKKLIDAKRDMGRVF |
| | | WSGVTAEKRNTILEGYNYLPNENDHKKREGSLENPKKPAKRQFGD |
| | | LLLYLEKKYAGDWGKVFDEAWERIDKKIAGLTSHIEREEARNAEDA |
| | | QSKAVLTDWLRAKASFVLERLKEMDEKEFYACEIQLQKWYGDLRG |
| | | NPFAVEAENRVVDISGFSIGSDGHSIQYRNLLAWKYLENGKREFYLL |
| | | MNYGKKGRIRFTDGTDIKKSGKWQGLLYGGGKAKVIDLTFDPDDE |
| | | QLIILPLAFGTRQGREFIWNDLLSLETGLIKLANGRVIEKTIYNKKIGR |
| | | DEPALFVALTFERREVVDPSNIKPVNLIGVARGENIPAVIALTDPEGC |
| | | PLPEFKDSSGGPTDILRIGEGYKEKQRAIQAAKEVEQRRAGGYSRK |
| | | FASKSRNLADDMVRNSARDLFYHAVTHDAVLVFANLSRGFGRQGK |
| | | RTFMTERQYTKMEDWLTAKLAYEGLTSKTYLSKTLAQYTSKTCSNC |
| | | GFTITYADMDVMLVRLKKTSDGWATTLNNKELKAEYQITYYNRYKR |
| | | QTVEKELSAELDRLSEESGNNDISKWTKGRRDEALFLLKKRFSHRP |
| | | VQEQFVCLDCGHEVHAAEQAALNIARSWLFLNSNSTEFKSYKSGK |
| | | QPFVGAWQAFYKRRLKEVWKPNA |
| APG80656.1 | 242 | MSKRHPRISGVKGYRLHAQRLEYTGKSGAMRTIKYPLYSSPSGGR |
| CRISPR- | | TVPREIVSAINDDYVGLYGLSNFDDLYNAEKRNEEKVYSVLDFWYD |
| associated protein | | CVQYGAVFSYTAPGLLKNVAEVRGGSYELTKTLKGSHLYDELQIDK |
| CasY [uncultured | | VIKFLNKKEISRANGSLDKLKKDIIDCFKAEYRERHKDQCNKLADDIK |
| Parcubacteria | | NAKKDAGASLGERQKKLFRDFFGISEQSENDKPSFTNPLNLTCCLL |
| group bacterium]; | | PFDTVNNNRNRGEVLFNKLKEYAQKLDKNEGSLEMWEYIGIGNSG |
| CasY polypeptide | | TAFSNFLGEGFLGRLRENKITELKKAMMDITDAWRGQEQEEELEKR |
| sequence | | LRILAALTIKLREPKFDNHWGGYRSDINGKLSSWLQNYINQTVKIKE |
| | | DLKGHKKDLKKAKEMINRFGESDTKEEAVVSSLLESIEKIVPDDSAD |
| | | DEKPDIPAIAIYRRFLSDGRLTLNRFVQREDVQEALIKERLEAEKKKK |
| | | PKKRKKKSDAEDEKETIDFKELFPHLAKPLKLVPNFYGDSKRELYKK |
| | | YKNAAIYTDALWKAVEKIYKSAFSSSLKNSFFDTDFDKDFFIKRLQKI |
| | | FSVYRRFNTDKWKPIVKNSFAPYCDIVSLAENEVLYKPKQSRSRKS |
| | | AAIDKNRVRLPSTENIAKAGIALARELSVAGFDWKDLLKKEEHEEYID |
| | | LIELHKTALALLLAVTETQLDISALDFVENGTVKDFMKTRDGNLVLEG |
| | | RFLEMFSQSIVFSELRGLAGLMSRKEFITRSAIQTMNGKQAELLYIP |
| | | HEFQSAKITTPKEMSRAFLDLAPAEFATSLEPESLSEKSLLKLKQMR |
| | | YYPHYFGYELTRTGQGIDGGVAENALRLEKSPVKKREIKCKQYKTL |
| | | GRGQNKIVLYVRSSYYQTQFLEWFLHRPKNVQTDVAVSGSFLIDEK |
| | | KVKTRWNYDALTVALEPVSGSERVFVSQPFTIFPEKSAEEEGQRYL |
| | | GIDIGEYGIAYTALEITGDSAKILDQNFISDPQLKTLREEVKGLKLDQR |
| | | RGTFAMPSTKIARIRESLVHSLRNRIHHLALKHKAKIVYELEVSRFEE |
| | | GKQKIKKVYATLKKADVYSEIDADKNLQTTVWGKLAVASEISASYTS |
| | | QFCGACKKLWRAEMQVDETITTQELIGTVRVIKGGTLIDAIKDFMRP |
| | | PIFDENDTPFPKYRDFCDKHHISKKMRGNSCLFICPFCRANADADIQ |
| | | ASQTIALLRYVKEEKKVEDYFERFRKLKNIKVLGQMKKI |
| wild type Cpf1 | 246 | MSIYQEFVNKYSLSKTLRFELIPQGKTLENIKARGLILDDEKRAKDYK |
| polypeptide | | KAKQIIDKYHQFFIEEILSSVCISEDLLQNYSDVYFKLKKSDDDNLQK |
| sequence | | DFKSAKDTIKKQISEYIKDSEKFKNLFNQNLIDAKKGQESDLILWLKQ |
| | | SKDNGIELFKANSDITDIDEALEIIKSFKGWTTYFKGFHENRKNVYSS |
| | | NDIPTSIIYRIVDDNLPKFLENKAKYESLKDKAPEAINYEQIKKDLAEE |
| | | LTFDIDYKTSEVNQRVFSLDEVFEIANFNNYLNQSGITKFNTIIGGKF |
| | | VNGENTKRKGINEYINLYSQQINDKTLKKYKMSVLFKQILSDTESKS |
| | | FVIDKLEDDSDVVTTMQSFYEQIAAFKTVEEKSIKETLSLLFDDLKAQ |
| | | KLDLSKIYFKNDKSLTDLSQQVFDDYSVIGTAVLEYITQQIAPKNLDN |
| | | PSKKEQELIAKKTEKAKYLSLETIKLALEEFNKHRDIDKQCRFEEILA |
| | | NFAAIPMIFDEIAQNKDNLAQISIKYQNQGKKDLLQASAEDDVKAIKD |
| | | LLDQTNNLLHKLKIFHISQSEDKANILDKDEHFYLVFEECYFELANIVP |
| | | LYNKIRNYITQKPYSDEKFKLNFENSTLANGWDKNKEPDNTAILFIKD |
| | | DKYYLGVMNKKNNKIFDDKAIKENKGEGYKKIVYKLLPGANKMLPK |
| | | VFFSAKSIKFYNPSEDILRIRNHSTHTKNGSPQKGYEKFEFNIEDCR |
| | | KFIDFYKQSISKHPEWKDFGFRFSDTQRYNSIDEFYREVENQGYKL |
| | | TFENISESYIDSVVNQGKLYLFQIYNKDFSAYSKGRPNLHTLYWKAL |
| | | FDERNLQDVVYKLNGEAELFYRKQSIPKKITHPAKEAIANKNKDNPK |
| | | KESVFEYDLIKDKRFTEDKFFFHCPITINFKSSGANKFNDEINLLLKE |
| | | KANDVHILSIDRGERHLAYYTLVDGKGNIIKQDTFNIIGNDRMKTNYH |
| | | DKLAAIEKDRDSARKDWKKINNIKEMKEGYLSQVVHEIAKLVIEYNAI |
| | | VVFEDLNFGFKRGRFKVEKQVYQKLEKMLIEKLNYLVFKDNEFDKT |
| | | GGVLRAYQLTAPFETFKKMGKQTGIIYYVPAGFTSKICPVTGFVNQL |
| | | YPKYESVSKSQEFFSKFDKICYNLDKGYFEFSFDYKNFGDKAAKGK |
| | | WTIASFGSRLINFRNSDKNHNWDTREVYPTKELEKLLKDYSIEYGH |
| | | GECIKAAICGESDKKFFAKLTSVLNTILQMRNSKTGTELDYLISPVAD |
| | | VNGNFFDSRQAPKNMPQDADANGAYHIGLKGLMLLGRIKNNQEGK |
| | | KLNLVIKNEEYFEFVQNRNN |
| Cpf1 D917A | 247 | MSIYQEFVNKYSLSKTLRFELIPQGKTLENIKARGLILDDEKRAKDYK |
| polypeptide | | KAKQIIDKYHQFFIEEILSSVCISEDLLQNYSDVYFKLKKSDDDNLQK |
| sequence | | DFKSAKDTIKKQISEYIKDSEKFKNLFNQNLIDAKKGQESDLILWLKQ |
| | | SKDNGIELFKANSDITDIDEALEIIKSFKGWTTYFKGFHENRKNVYSS |
| | | NDIPTSIIYRIVDDNLPKFLENKAKYESLKDKAPEAINYEQIKKDLAEE |
| | | LTFDIDYKTSEVNQRVFSLDEVFEIANFNNYLNQSGITKFNTIIGGKF |
| | | VNGENTKRKGINEYINLYSQQINDKTLKKYKMSVLFKQILSDTESKS |
| | | FVIDKLEDDSDVVTTMQSFYEQIAAFKTVEEKSIKETLSLLFDDLKAQ |
| | | KLDLSKIYFKNDKSLTDLSQQVFDDYSVIGTAVLEYITQQIAPKNLDN |
| | | PSKKEQELIAKKTEKAKYLSLETIKLALEEFNKHRDIDKQCRFEEILA |
| | | NFAAIPMIFDEIAQNKDNLAQISIKYQNQGKKDLLQASAEDDVKAIKD |
| | | LLDQTNNLLHKLKIFHISQSEDKANILDKDEHFYLVFEECYFELANIVP |
| | | LYNKIRNYITQKPYSDEKFKLNFENSTLANGWDKNKEPDNTAILFIKD |
| | | DKYYLGVMNKKNNKIFDDKAIKENKGEGYKKIVYKLLPGANKMLPK |
| | | VFFSAKSIKFYNPSEDILRIRNHSTHTKNGSPQKGYEKFEFNIEDCR |
| | | KFIDFYKQSISKHPEWKDFGFRFSDTQRYNSIDEFYREVENQGYKL |
| | | TFENISESYIDSVVNQGKLYLFQIYNKDFSAYSKGRPNLHTLYWKAL |
| | | FDERNLQDVVYKLNGEAELFYRKQSIPKKITHPAKEAIANKNKDNPK |
| | | KESVFEYDLIKDKRFTEDKFFFHCPITINFKSSGANKFNDEINLLLKE |
| | | KANDVHILSIARGERHLAYYTLVDGKGNIIKQDTFNIIGNDRMKTNYH |
| | | DKLAAIEKDRDSARKDWKKINNIKEMKEGYLSQVVHEIAKLVIEYNAI |
| | | VVFEDLNFGFKRGRFKVEKQVYQKLEKMLIEKLNYLVFKDNEFDKT |
| | | GGVLRAYQLTAPFETFKKMGKQTGIIYYVPAGFTSKICPVTGFVNQL |
| | | YPKYESVSKSQEFFSKFDKICYNLDKGYFEFSFDYKNFGDKAAKGK |
| | | WTIASFGSRLINFRNSDKNHNWDTREVYPTKELEKLLKDYSIEYGH |
| | | GECIKAAICGESDKKFFAKLTSVLNTILQMRNSKTGTELDYLISPVAD |
| | | VNGNFFDSRQAPKNMPQDADANGAYHIGLKGLMLLGRIKNNQEGK |
| | | KLNLVIKNEEYFEFVQNRNN |
| Cpf1 E1006A | 248 | MSIYQEFVNKYSLSKTLRFELIPQGKTLENIKARGLILDDEKRAKDYK |
| polypeptide | | KAKQIIDKYHQFFIEEILSSVCISEDLLQNYSDVYFKLKKSDDDNLQK |
| sequence | | DFKSAKDTIKKQISEYIKDSEKFKNLFNQNLIDAKKGQESDLILWLKQ |
| | | SKDNGIELFKANSDITDIDEALEIIKSFKGWTTYFKGFHENRKNVYSS |
| | | NDIPTSIIYRIVDDNLPKFLENKAKYESLKDKAPEAINYEQIKKDLAEE |
| | | LTFDIDYKTSEVNQRVFSLDEVFEIANFNNYLNQSGITKFNTIIGGKF |
| | | VNGENTKRKGINEYINLYSQQINDKTLKKYKMSVLFKQILSDTESKS |
| | | FVIDKLEDDSDVVTTMQSFYEQIAAFKTVEEKSIKETLSLLFDDLKAQ |
| | | KLDLSKIYFKNDKSLTDLSQQVFDDYSVIGTAVLEYITQQIAPKNLDN |
| | | PSKKEQELIAKKTEKAKYLSLETIKLALEEFNKHRDIDKQCRFEEILA |
| | | NFAAIPMIFDEIAQNKDNLAQISIKYQNQGKKDLLQASAEDDVKAIKD |
| | | LLDQTNNLLHKLKIFHISQSEDKANILDKDEHFYLVFEECYFELANIVP |
| | | LYNKIRNYITQKPYSDEKFKLNFENSTLANGWDKNKEPDNTAILFIKD |
| | | DKYYLGVMNKKNNKIFDDKAIKENKGEGYKKIVYKLLPGANKMLPK |
| | | VFFSAKSIKFYNPSEDILRIRNHSTHTKNGSPQKGYEKFEFNIEDCR |
| | | KFIDFYKQSISKHPEWKDFGFRFSDTQRYNSIDEFYREVENQGYKL |
| | | TFENISESYIDSVVNQGKLYLFQIYNKDFSAYSKGRPNLHTLYWKAL |
| | | FDERNLQDVVYKLNGEAELFYRKQSIPKKITHPAKEAIANKNKDNPK |
| | | KESVFEYDLIKDKRFTEDKFFFHCPITINFKSSGANKFNDEINLLLKE |
| | | KANDVHILSIDRGERHLAYYTLVDGKGNIIKQDTFNIIGNDRMKTNYH |
| | | DKLAAIEKDRDSARKDWKKINNIKEMKEGYLSQVVHEIAKLVIEYNAI |
| | | VVFADLNFGFKRGRFKVEKQVYQKLEKMLIEKLNYLVFKDNEFDKT |
| | | GGVLRAYQLTAPFETFKKMGKQTGIIYYVPAGFTSKICPVTGFVNQL |
| | | YPKYESVSKSQEFFSKFDKICYNLDKGYFEFSFDYKNFGDKAAKGK |
| | | WTIASFGSRLINFRNSDKNHNWDTREVYPTKELEKLLKDYSIEYGH |
| | | GECIKAAICGESDKKFFAKLTSVLNTILQMRNSKTGTELDYLISPVAD |
| | | VNGNFFDSRQAPKNMPQDADANGAYHIGLKGLMLLGRIKNNQEGK |
| | | KLNLVIKNEEYFEFVQNRNN |
| Cpf1 D1255A | 249 | MSIYQEFVNKYSLSKTLRFELIPQGKTLENIKARGLILDDEKRAKDYK |
| polypeptide | | KAKQIIDKYHQFFIEEILSSVCISEDLLQNYSDVYFKLKKSDDDNLQK |
| sequence | | DFKSAKDTIKKQISEYIKDSEKFKNLFNQNLIDAKKGQESDLILWLKQ |
| | | SKDNGIELFKANSDITDIDEALEIIKSFKGWTTYFKGFHENRKNVYSS |
| | | NDIPTSIIYRIVDDNLPKFLENKAKYESLKDKAPEAINYEQIKKDLAEE |
| | | LTFDIDYKTSEVNQRVFSLDEVFEIANFNNYLNQSGITKFNTIIGGKF |
| | | VNGENTKRKGINEYINLYSQQINDKTLKKYKMSVLFKQILSDTESKS |
| | | FVIDKLEDDSDVVTTMQSFYEQIAAFKTVEEKSIKETLSLLFDDLKAQ |
| | | KLDLSKIYFKNDKSLTDLSQQVFDDYSVIGTAVLEYITQQIAPKNLDN |
| | | PSKKEQELIAKKTEKAKYLSLETIKLALEEFNKHRDIDKQCRFEEILA |
| | | NFAAIPMIFDEIAQNKDNLAQISIKYQNQGKKDLLQASAEDDVKAIKD |
| | | LLDQTNNLLHKLKIFHISQSEDKANILDKDEHFYLVFEECYFELANIVP |
| | | LYNKIRNYITQKPYSDEKFKLNFENSTLANGWDKNKEPDNTAILFIKD |
| | | DKYYLGVMNKKNNKIFDDKAIKENKGEGYKKIVYKLLPGANKMLPK |
| | | VFFSAKSIKFYNPSEDILRIRNHSTHTKNGSPQKGYEKFEFNIEDCR |
| | | KFIDFYKQSISKHPEWKDFGFRFSDTQRYNSIDEFYREVENQGYKL |
| | | TFENISESYIDSVVNQGKLYLFQIYNKDFSAYSKGRPNLHTLYWKAL |
| | | FDERNLQDVVYKLNGEAELFYRKQSIPKKITHPAKEAIANKNKDNPK |
| | | KESVFEYDLIKDKRFTEDKFFFHCPITINFKSSGANKFNDEINLLLKE |
| | | KANDVHILSIDRGERHLAYYTLVDGKGNIIKQDTFNIIGNDRMKTNYH |
| | | DKLAAIEKDRDSARKDWKKINNIKEMKEGYLSQVVHEIAKLVIEYNAI |
| | | VVFEDLNFGFKRGRFKVEKQVYQKLEKMLIEKLNYLVFKDNEFDKT |
| | | GGVLRAYQLTAPFETFKKMGKQTGIIYYVPAGFTSKICPVTGFVNQL |
| | | YPKYESVSKSQEFFSKFDKICYNLDKGYFEFSFDYKNFGDKAAKGK |
| | | WTIASFGSRLINFRNSDKNHNWDTREVYPTKELEKLLKDYSIEYGH |
| | | GECIKAAICGESDKKFFAKLTSVLNTILQMRNSKTGTELDYLISPVAD |
| | | VNGNFFDSRQAPKNMPQDAAANGAYHIGLKGLMLLGRIKNNQEGK |
| | | KLNLVIKNEEYFEFVQNRNN |
| Cpf1 | 250 | MSIYQEFVNKYSLSKTLRFELIPQGKTLENIKARGLILDDEKRAKDYK |
| D917A/E1006A | | KAKQIIDKYHQFFIEEILSSVCISEDLLQNYSDVYFKLKKSDDDNLQK |
| polypeptide | | DFKSAKDTIKKQISEYIKDSEKFKNLFNQNLIDAKKGQESDLILWLKQ |
| sequence | | SKDNGIELFKANSDITDIDEALEIIKSFKGWTTYFKGFHENRKNVYSS |
| | | NDIPTSIIYRIVDDNLPKFLENKAKYESLKDKAPEAINYEQIKKDLAEE |
| | | LTFDIDYKTSEVNQRVFSLDEVFEIANFNNYLNQSGITKFNTIIGGKF |
| | | VNGENTKRKGINEYINLYSQQINDKTLKKYKMSVLFKQILSDTESKS |
| | | FVIDKLEDDSDVVTTMQSFYEQIAAFKTVEEKSIKETLSLLFDDLKAQ |
| | | KLDLSKIYFKNDKSLTDLSQQVFDDYSVIGTAVLEYITQQIAPKNLDN |
| | | PSKKEQELIAKKTEKAKYLSLETIKLALEEFNKHRDIDKQCRFEEILA |
| | | NFAAIPMIFDEIAQNKDNLAQISIKYQNQGKKDLLQASAEDDVKAIKD |
| | | LLDQTNNLLHKLKIFHISQSEDKANILDKDEHFYLVFEECYFELANIVP |
| | | LYNKIRNYITQKPYSDEKFKLNFENSTLANGWDKNKEPDNTAILFIKD |
| | | DKYYLGVMNKKNNKIFDDKAIKENKGEGYKKIVYKLLPGANKMLPK |
| | | VFFSAKSIKFYNPSEDILRIRNHSTHTKNGSPQKGYEKFEFNIEDCR |
| | | KFIDFYKQSISKHPEWKDFGFRFSDTQRYNSIDEFYREVENQGYKL |
| | | TFENISESYIDSVVNQGKLYLFQIYNKDFSAYSKGRPNLHTLYWKAL |
| | | FDERNLQDVVYKLNGEAELFYRKQSIPKKITHPAKEAIANKNKDNPK |
| | | KESVFEYDLIKDKRFTEDKFFFHCPITINFKSSGANKFNDEINLLLKE |
| | | KANDVHILSIARGERHLAYYTLVDGKGNIIKQDTFNIIGNDRMKTNYH |
| | | DKLAAIEKDRDSARKDWKKINNIKEMKEGYLSQVVHEIAKLVIEYNAI |
| | | VVFADLNFGFKRGRFKVEKQVYQKLEKMLIEKLNYLVFKDNEFDKT |
| | | GGVLRAYQLTAPFETFKKMGKQTGIIYYVPAGFTSKICPVTGFVNQL |
| | | YPKYESVSKSQEFFSKFDKICYNLDKGYFEFSFDYKNFGDKAAKGK |
| | | WTIASFGSRLINFRNSDKNHNWDTREVYPTKELEKLLKDYSIEYGH |
| | | GECIKAAICGESDKKFFAKLTSVLNTILQMRNSKTGTELDYLISPVAD |
| | | VNGNFFDSRQAPKNMPQDADANGAYHIGLKGLMLLGRIKNNQEGK |
| | | KLNLVIKNEEYFEFVQNRNN |
| Cpf1 | 251 | MSIYQEFVNKYSLSKTLRFELIPQGKTLENIKARGLILDDEKRAKDYK |
| D917A/D1255A | | KAKQIIDKYHQFFIEEILSSVCISEDLLQNYSDVYFKLKKSDDDNLQK |
| polypeptide | | DFKSAKDTIKKQISEYIKDSEKFKNLFNQNLIDAKKGQESDLILWLKQ |
| sequence | | SKDNGIELFKANSDITDIDEALEIIKSFKGWTTYFKGFHENRKNVYSS |
| | | NDIPTSIIYRIVDDNLPKFLENKAKYESLKDKAPEAINYEQIKKDLAEE |
| | | LTFDIDYKTSEVNQRVFSLDEVFEIANFNNYLNQSGITKFNTIIGGKF |
| | | VNGENTKRKGINEYINLYSQQINDKTLKKYKMSVLFKQILSDTESKS |
| | | FVIDKLEDDSDVVTTMQSFYEQIAAFKTVEEKSIKETLSLLFDDLKAQ |
| | | KLDLSKIYFKNDKSLTDLSQQVFDDYSVIGTAVLEYITQQIAPKNLDN |
| | | PSKKEQELIAKKTEKAKYLSLETIKLALEEFNKHRDIDKQCRFEEILA |
| | | NFAAIPMIFDEIAQNKDNLAQISIKYQNQGKKDLLQASAEDDVKAIKD |
| | | LLDQTNNLLHKLKIFHISQSEDKANILDKDEHFYLVFEECYFELANIVP |
| | | LYNKIRNYITQKPYSDEKFKLNFENSTLANGWDKNKEPDNTAILFIKD |
| | | DKYYLGVMNKKNNKIFDDKAIKENKGEGYKKIVYKLLPGANKMLPK |
| | | VFFSAKSIKFYNPSEDILRIRNHSTHTKNGSPQKGYEKFEFNIEDCR |
| | | KFIDFYKQSISKHPEWKDFGFRFSDTQRYNSIDEFYREVENQGYKL |
| | | TFENISESYIDSVVNQGKLYLFQIYNKDFSAYSKGRPNLHTLYWKAL |
| | | FDERNLQDVVYKLNGEAELFYRKQSIPKKITHPAKEAIANKNKDNPK |
| | | KESVFEYDLIKDKRFTEDKFFFHCPITINFKSSGANKFNDEINLLLKE |
| | | KANDVHILSIARGERHLAYYTLVDGKGNIIKQDTFNIIGNDRMKTNYH |
| | | DKLAAIEKDRDSARKDWKKINNIKEMKEGYLSQVVHEIAKLVIEYNAI |
| | | VVFEDLNFGFKRGRFKVEKQVYQKLEKMLIEKLNYLVFKDNEFDKT |
| | | GGVLRAYQLTAPFETFKKMGKQTGIIYYVPAGFTSKICPVTGFVNQL |
| | | YPKYESVSKSQEFFSKFDKICYNLDKGYFEFSFDYKNFGDKAAKGK |
| | | WTIASFGSRLINFRNSDKNHNWDTREVYPTKELEKLLKDYSIEYGH |
| | | GECIKAAICGESDKKFFAKLTSVLNTILQMRNSKTGTELDYLISPVAD |
| | | VNGNFFDSRQAPKNMPQDAAANGAYHIGLKGLMLLGRIKNNQEGK |
| | | KLNLVIKNEEYFEFVQNRNN |
| Cpf1 | 252 | MSIYQEFVNKYSLSKTLRFELIPQGKTLENIKARGLILDDEKRAKDYK |
| E1006A/D1255A | | KAKQIIDKYHQFFIEEILSSVCISEDLLQNYSDVYFKLKKSDDDNLQK |
| polypeptide | | DFKSAKDTIKKQISEYIKDSEKFKNLFNQNLIDAKKGQESDLILWLKQ |
| sequence | | SKDNGIELFKANSDITDIDEALEIIKSFKGWTTYFKGFHENRKNVYSS |
| | | NDIPTSIIYRIVDDNLPKFLENKAKYESLKDKAPEAINYEQIKKDLAEE |
| | | LTFDIDYKTSEVNQRVFSLDEVFEIANFNNYLNQSGITKFNTIIGGKF |
| | | VNGENTKRKGINEYINLYSQQINDKTLKKYKMSVLFKQILSDTESKS |
| | | FVIDKLEDDSDVVTTMQSFYEQIAAFKTVEEKSIKETLSLLFDDLKAQ |
| | | KLDLSKIYFKNDKSLTDLSQQVFDDYSVIGTAVLEYITQQIAPKNLDN |
| | | PSKKEQELIAKKTEKAKYLSLETIKLALEEFNKHRDIDKQCRFEEILA |
| | | NFAAIPMIFDEIAQNKDNLAQISIKYQNQGKKDLLQASAEDDVKAIKD |
| | | LLDQTNNLLHKLKIFHISQSEDKANILDKDEHFYLVFEECYFELANIVP |
| | | LYNKIRNYITQKPYSDEKFKLNFENSTLANGWDKNKEPDNTAILFIKD |
| | | DKYYLGVMNKKNNKIFDDKAIKENKGEGYKKIVYKLLPGANKMLPK |
| | | VFFSAKSIKFYNPSEDILRIRNHSTHTKNGSPQKGYEKFEFNIEDCR |
| | | KFIDFYKQSISKHPEWKDFGFRFSDTQRYNSIDEFYREVENQGYKL |
| | | TFENISESYIDSVVNQGKLYLFQIYNKDFSAYSKGRPNLHTLYWKAL |
| | | FDERNLQDVVYKLNGEAELFYRKQSIPKKITHPAKEAIANKNKDNPK |
| | | KESVFEYDLIKDKRFTEDKFFFHCPITINFKSSGANKFNDEINLLLKE |
| | | KANDVHILSIDRGERHLAYYTLVDGKGNIIKQDTFNIIGNDRMKTNYH |
| | | DKLAAIEKDRDSARKDWKKINNIKEMKEGYLSQVVHEIAKLVIEYNAI |
| | | VVFADLNFGFKRGRFKVEKQVYQKLEKMLIEKLNYLVFKDNEFDKT |
| | | GGVLRAYQLTAPFETFKKMGKQTGIIYYVPAGFTSKICPVTGFVNQL |
| | | YPKYESVSKSQEFFSKFDKICYNLDKGYFEFSFDYKNFGDKAAKGK |
| | | WTIASFGSRLINFRNSDKNHNWDTREVYPTKELEKLLKDYSIEYGH |
| | | GECIKAAICGESDKKFFAKLTSVLNTILQMRNSKTGTELDYLISPVAD |
| | | VNGNFFDSRQAPKNMPQDAAANGAYHIGLKGLMLLGRIKNNQEGK |
| | | KLNLVIKNEEYFEFVQNRNN |
| Cpf1 | 253 | MSIYQEFVNKYSLSKTLRFELIPQGKTLENIKARGLILDDEKRAKDYK |
| D917A/E1006A/ | | KAKQIIDKYHQFFIEEILSSVCISEDLLQNYSDVYFKLKKSDDDNLQK |
| D1255A polypeptide | | DFKSAKDTIKKQISEYIKDSEKFKNLFNQNLIDAKKGQESDLILWLKQ |
| sequence | | SKDNGIELFKANSDITDIDEALEIIKSFKGWTTYFKGFHENRKNVYSS |
| | | NDIPTSIIYRIVDDNLPKFLENKAKYESLKDKAPEAINYEQIKKDLAEE |
| | | LTFDIDYKTSEVNQRVFSLDEVFEIANFNNYLNQSGITKFNTIIGGKF |
| | | VNGENTKRKGINEYINLYSQQINDKTLKKYKMSVLFKQILSDTESKS |
| | | FVIDKLEDDSDVVTTMQSFYEQIAAFKTVEEKSIKETLSLLFDDLKAQ |
| | | KLDLSKIYFKNDKSLTDLSQQVFDDYSVIGTAVLEYITQQIAPKNLDN |
| | | PSKKEQELIAKKTEKAKYLSLETIKLALEEFNKHRDIDKQCRFEEILA |
| | | NFAAIPMIFDEIAQNKDNLAQISIKYQNQGKKDLLQASAEDDVKAIKD |
| | | LLDQTNNLLHKLKIFHISQSEDKANILDKDEHFYLVFEECYFELANIVP |
| | | LYNKIRNYITQKPYSDEKFKLNFENSTLANGWDKNKEPDNTAILFIKD |
| | | DKYYLGVMNKKNNKIFDDKAIKENKGEGYKKIVYKLLPGANKMLPK |
| | | VFFSAKSIKFYNPSEDILRIRNHSTHTKNGSPQKGYEKFEFNIEDCR |
| | | KFIDFYKQSISKHPEWKDFGFRFSDTQRYNSIDEFYREVENQGYKL |
| | | TFENISESYIDSVVNQGKLYLFQIYNKDFSAYSKGRPNLHTLYWKAL |
| | | FDERNLQDVVYKLNGEAELFYRKQSIPKKITHPAKEAIANKNKDNPK |
| | | KESVFEYDLIKDKRFTEDKFFFHCPITINFKSSGANKFNDEINLLLKE |
| | | KANDVHILSIARGERHLAYYTLVDGKGNIIKQDTFNIIGNDRMKTNYH |
| | | DKLAAIEKDRDSARKDWKKINNIKEMKEGYLSQVVHEIAKLVIEYNAI |
| | | VVFADLNFGFKRGRFKVEKQVYQKLEKMLIEKLNYLVFKDNEFDKT |
| | | GGVLRAYQLTAPFETFKKMGKQTGIIYYVPAGFTSKICPVTGFVNQL |
| | | YPKYESVSKSQEFFSKFDKICYNLDKGYFEFSFDYKNFGDKAAKGK |
| | | WTIASFGSRLINFRNSDKNHNWDTREVYPTKELEKLLKDYSIEYGH |
| | | GECIKAAICGESDKKFFAKLTSVLNTILQMRNSKTGTELDYLISPVAD |
| | | VNGNFFDSRQAPKNMPQDAAANGAYHIGLKGLMLLGRIKNNQEGK |
| | | KLNLVIKNEEYFEFVQNRNN |
| synthetic | 254 | KRNYILGLDIGITSVGYGIIDYETRDVIDAGVRLFKEANVENNEGRRS |
| polypeptide | | KRGARRLKRRRRHRIQRVKKLLFDYNLLTDHSELSGINPYEARVKG |
| | | LSQKLSEEEFSAALLHLAKRRGVHNVNEVEEDTGNELSTKEQISRN |
| | | SKALEEKYVAELQLERLKKDGEVRGSINRFKTSDYVKEAKQLLKVQ |
| | | KAYHQLDQSFIDTYIDLLETRRTYYEGPGEGSPFGWKDIKEWYEML |
| | | MGHCTYFPEELRSVKYAYNADLYNALNDLNNLVITRDENEKLEYYE |
| | | KFQIIENVFKQKKKPTLKQIAKEILVNEEDIKGYRVTSTGKPEFTNLKV |
| | | YHDIKDITARKEIIENAELLDQIAKILTIYQSSEDIQEELTNLNSELTQE |
| | | EIEQISNLKGYTGTHNLSLKAINLILDELWHTNDNQIAIFNRLKLVPKK |
| | | VDLSQQKEIPTTLVDDFILSPVVKRSFIQSIKVINAIIKKYGLPNDIIIELA |
| | | REKNSKDAQKMINEMQKRNRQTNERIEEIIRTTGKENAKYLIEKIKLH |
| | | DMQEGKCLYSLEAIPLEDLLNNPFNYEVDHIIPRSVSFDNSFNNKVL |
| | | VKQEENSKKGNRTPFQYLSSSDSKISYETFKKHILNLAKGKGRISKT |
| | | KKEYLLEERDINRFSVQKDFINRNLVDTRYATRGLMNLLRSYFRVN |
| | | NLDVKVKSINGGFTSFLRRKWKFKKERNKGYKHHAEDALIIANADFI |
| | | FKEWKKLDKAKKVMENQMFEEKQAESMPEIETEQEYKEIFITPHQIK |
| | | HIKDFKDYKYSHRVDKKPNRELINDTLYSTRKDDKGNTLIVNNLNGL |
| | | YDKDNDKLKKLINKSPEKLLMYHHDPQTYQKLKLIMEQYGDEKNPL |
| | | YKYYEETGNYLTKYSKKDNGPVIKKIKYYGNKLNAHLDITDDYPNSR |
| | | NKVVKLSLKPYRFDVYLDNGVYKFVTVKNLDVIKKENYYEVNSKCY |
| | | EEAKKLKKISNQAEFIASFYNNDLIKINGELYRVIGVNNDLLNRIEVNM |
| | | IDITYREYLENMNDKRPPRIIKTIASKTQSIKKYSTDILGNLYEVKSKK |
| | | HPQIIKKG |
| SaCas9n | 255 | KRNYILGLDIGITSVGYGIIDYETRDVIDAGVRLFKEANVENNEGRRS |
| polypeptide | | KRGARRLKRRRRHRIQRVKKLLFDYNLLTDHSELSGINPYEARVKG |
| sequence | | LSQKLSEEEFSAALLHLAKRRGVHNVNEVEEDTGNELSTKEQISRN |
| | | SKALEEKYVAELQLERLKKDGEVRGSINRFKTSDYVKEAKQLLKVQ |
| | | KAYHQLDQSFIDTYIDLLETRRTYYEGPGEGSPFGWKDIKEWYEML |
| | | MGHCTYFPEELRSVKYAYNADLYNALNDLNNLVITRDENEKLEYYE |
| | | KFQIIENVFKQKKKPTLKQIAKEILVNEEDIKGYRVTSTGKPEFTNLKV |
| | | YHDIKDITARKEIIENAELLDQIAKILTIYQSSEDIQEELTNLNSELTQE |
| | | EIEQISNLKGYTGTHNLSLKAINLILDELWHTNDNQIAIFNRLKLVPKK |
| | | VDLSQQKEIPTTLVDDFILSPVVKRSFIQSIKVINAIIKKYGLPNDIIIELA |
| | | REKNSKDAQKMINEMQKRNRQTNERIEEIIRTTGKENAKYLIEKIKLH |
| | | DMQEGKCLYSLEAIPLEDLLNNPFNYEVDHIIPRSVSFDNSFNNKVL |
| | | VKQEEASKKGNRTPFQYLSSSDSKISYETFKKHILNLAKGKGRISKT |
| | | KKEYLLEERDINRFSVQKDFINRNLVDTRYATRGLMNLLRSYFRVN |
| | | NLDVKVKSINGGFTSFLRRKWKFKKERNKGYKHHAEDALIIANADFI |
| | | FKEWKKLDKAKKVMENQMFEEKQAESMPEIETEQEYKEIFITPHQIK |
| | | HIKDFKDYKYSHRVDKKPNRELINDTLYSTRKDDKGNTLIVNNLNGL |
| | | YDKDNDKLKKLINKSPEKLLMYHHDPQTYQKLKLIMEQYGDEKNPL |
| | | YKYYEETGNYLTKYSKKDNGPVIKKIKYYGNKLNAHLDITDDYPNSR |
| | | NKVVKLSLKPYRFDVYLDNGVYKFVTVKNLDVIKKENYYEVNSKCY |
| | | EEAKKLKKISNQAEFIASFYNNDLIKINGELYRVIGVNNDLLNRIEVNM |
| | | IDITYREYLENMNDKRPPRIIKTIASKTQSIKKYSTDILGNLYEVKSKK |
| | | HPQIIKKG |
| SaKKH Cas9 | 256 | KRNYILGLDIGITSVGYGIIDYETRDVIDAGVRLFKEANVENNEGRRS |
| polypeptide | | KRGARRLKRRRRHRIQRVKKLLFDYNLLTDHSELSGINPYEARVKG |
| sequence | | LSQKLSEEEFSAALLHLAKRRGVHNVNEVEEDTGNELSTKEQISRN |
| | | SKALEEKYVAELQLERLKKDGEVRGSINRFKTSDYVKEAKQLLKVQ |
| | | KAYHQLDQSFIDTYIDLLETRRTYYEGPGEGSPFGWKDIKEWYEML |
| | | MGHCTYFPEELRSVKYAYNADLYNALNDLNNLVITRDENEKLEYYE |
| | | KFQIIENVFKQKKKPTLKQIAKEILVNEEDIKGYRVTSTGKPEFTNLKV |
| | | YHDIKDITARKEIIENAELLDQIAKILTIYQSSEDIQEELTNLNSELTQE |
| | | EIEQISNLKGYTGTHNLSLKAINLILDELWHTNDNQIAIFNRLKLVPKK |
| | | VDLSQQKEIPTTLVDDFILSPVVKRSFIQSIKVINAIIKKYGLPNDIIIELA |
| | | REKNSKDAQKMINEMQKRNRQTNERIEEIIRTTGKENAKYLIEKIKLH |
| | | DMQEGKCLYSLEAIPLEDLLNNPFNYEVDHIIPRSVSFDNSFNNKVL |
| | | VKQEEASKKGNRTPFQYLSSSDSKISYETFKKHILNLAKGKGRISKT |
| | | KKEYLLEERDINRFSVQKDFINRNLVDTRYATRGLMNLLRSYFRVN |
| | | NLDVKVKSINGGFTSFLRRKWKFKKERNKGYKHHAEDALIIANADFI |
| | | FKEWKKLDKAKKVMENQMFEEKQAESMPEIETEQEYKEIFITPHQIK |
| | | HIKDFKDYKYSHRVDKKPNRKLINDTLYSTRKDDKGNTLIVNNLNGL |
| | | YDKDNDKLKKLINKSPEKLLMYHHDPQTYQKLKLIMEQYGDEKNPL |
| | | YKYYEETGNYLTKYSKKDNGPVIKKIKYYGNKLNAHLDITDDYPNSR |
| | | NKVVKLSLKPYRFDVYLDNGVYKFVTVKNLDVIKKENYYEVNSKCY |
| | | EEAKKLKKISNQAEFIASFYKNDLIKINGELYRVIGVNNDLLNRIEVNM |
| | | IDITYREYLENMNDKRPPHIIKTIASKTQSIKKYSTDILGNLYEVKSKK |
| | | HPQIIKKG |
| Casphi-1 | 285 | MADTPTLFTQFLRHHLPGQRFRKDILKQAGRILANKGEDATIAFLRG |
| polypeptide | | KSEESPPDFQPPVKCPIIACSRPLTEWPIYQASVAIQGYVYGQSLAE |
| sequence | | FEASDPGCSKDGLLGWFDKTGVCTDYFSVQGLNLIFQNARKRYIGV |
| | | QTKVTNRNEKRHKKLKRINAKRIAEGLPELTSDEPESALDETGHLID |
| | | PPGLNTNIYCYQQVSPKPLALSEVNQLPTAYAGYSTSGDDPIQPMV |
| | | TKDRLSISKGQPGYIPEHQRALLSQKKHRRMRGYGLKARALLVIVRI |
| | | QDDWAVIDLRSLLRNAYWRRIVQTKEPSTITKLLKLVTGDPVLDATR |
| | | MVATFTYKPGIVQVRSAKCLKNKQGSKLFSERYLNETVSVTSIDLGS |
| | | NNLVAVATYRLVNGNTPELLQRFTLPSHLVKDFERYKQAHDTLEDSI |
| | | QKTAVASLPQGQQTEIRMWSMYGFREAQERVCQELGLADGSIPW |
| | | NVMTATSTILTDLFLARGGDPKKCMFTSEPKKKKNSKQVLYKIRDR |
| | | AWAKMYRTLLSKETREAWNKALWGLKRGSPDYARLSKRKEELAR |
| | | RCVNYTISTAEKRAQCGRTIVALEDLNIGFFHGRGKQEPGWWVGLFT |
| | | RKKENRWLMQALHKAFLELAHHRGYHVIEVNPAYTSQTCPVCRHC |
| | | DPDNRDQHNREAFHCIGCGFRGNADLDVATHNIAMVAITGESLKRA |
| | | RGSVASKTPQPLAAE |
| Casphi-2 | 286 | MPKPAVESEFSKVLKKHFPGERFRSSYMKRGGKILAAQGEEAVVA |
| polypeptide | | YLQGKSEEEPPNFQPPAKCHVVTKSRDFAEWPIMKASEAIQRYIYA |
| sequence | | LSTTERAACKPGKSSESHAAWFAATGVSNHGYSHVQGLNLIFDHTL |
| | | GRYDGVLKKVQLRNEKARARLESINASRADEGLPEIKAEEEEVATN |
| | | ETGHLLQPPGINPSFYVYQTISPQAYRPRDEIVLPPEYAGYVRDPNA |
| | | PIPLGVVRNRCDIQKGCPGYIPEWQREAGTAISPKTGKAVTVPGLS |
| | | PKKNKRMRRYWRSEKEKAQDALLVTVRIGTDWVIDVRGLLRNAR |
| | | WRTIAPKDISLNALLDLFTGDPVIDVRRNIVTFTYTLDACGTYARKWT |
| | | LKGKQTKATLDKLTATQTVALVAIDLGQTNPISAGISRVTQENGALQ |
| | | CEPLDRFTLPDDLLKDISAYRIAWDRNEEELRARSVEALPEAQQAE |
| | | VRALDGVSKETARTQLCADFGLDPKRLPWDKMSSNTTFISEALLSN |
| | | SVSRDQVFFTPAPKKGAKKKAPVEVMRKDRTWARAYKPRLSVEAQ |
| | | KLKNEALWALKRTSPEYLKLSRRKEELCRRSINYVIEKTRRRTQCQI |
| | | VIPVIEDLNVRFFHGSGKRLPGWDNFFTAKKENRWFIQGLHKAFSD |
| | | LRTHRSFYVFEVRPERTSITCPKCGHCEVGNRDGEAFQCLSCGKT |
| | | CNADLDVATHNLTQVALTGKTMPKREEPRDAQGTAPARKTKKASK |
| | | SKAPPAEREDQTPAQEPSQTS |
| Casphi-3 | 287 | MEKEITELTKIRREFPNKKFSSTDMKKAGKLLKAEGPDAVRDFLNSC |
| polypeptide | | QEIIGDFKPPVKTNIVSISRPFEEWPVSMVGRAIQEYYFSLTKEELES |
| sequence | | VHPGTSSEDHKSFFNITGLSNYNYTSVQGLNLIFKNAKAIYDGTLVK |
| | | ANNKNKKLEKKFNEINHKRSLEGLPIITPDFEEPFDENGHLNNPPGI |
| | | NRNIYGYQGCAAKVFVPSKHKMVSLPKEYEGYNRDPNLSLAGFRN |
| | | RLEIPEGEPGHVPWFQRMDIPEGQIGHVNKIQRFNFVHGKNSGKVK |
| | | FSDKTGRVKRYHHSKYKDATKPYKFLEESKKVSALDSILAIITIGDDW |
| | | VVFDIRGLYRNVFYRELAQKGLTAVQLLDLFTGDPVIDPKKGVVTFS |
| | | YKEGVVPVFSQKIVPRFKSRDTLEKLTSQGPVALLSVDLGQNEPVA |
| | | ARVCSLKNINDKITLDNSCRISFLDDYKKQIKDYRDSLDELEIKIRLEAI |
| | | NSLETNQQVEIRDLDVFSADRAKANTVDMFDIDPNLISWDSMSDAR |
| | | VSTQISDLYLKNGGDESRVYFEINNKRIKRSDYNISQLVRPKLSDST |
| | | RKNLNDSIWKLKRTSEEYLKLSKRKLELSRAVVNYTIRQSKLLSGIN |
| | | DIVIILEDLDVKKKFNGRGIRDIGWDNFFSSRKENRWFIPAFHKAFSE |
| | | LSSNRGLCVIEVNPAWTSATCPDCGFCSKENRDGINFTCRKCGVS |
| | | YHADIDVATLNIARVAVLGKPMSGPADRERLGDTKKPRVARSRKTM |
| | | KRKDISNSTVEAMVTA |
| Casphi-4 | 288 | MYSLEMADLKSEPSLLAKLLRDRFPGKYWLPKYWKLAEKKRLTGG |
| polypeptide | | EEAACEYMADKQLDSPPPNFRPPARCVILAKSRPFEDWPVHRVAS |
| sequence | | KAQSFVIGLSEQGFAALRAAPPSTADARRDWLRSHGASEDDLMAL |
| | | EAQLLETIMGNAISLHGGVLKKIDNANVKAAKRLSGRNEARLNKGLQ |
| | | ELPPEQEGSAYGADGLLVNPPGLNLNIYCRKSCCPKPVKNTARFVG |
| | | HYPGYLRDSDSILISGTMDRLTIIEGMPGHIPAWQREQGLVKPGGR |
| | | RRRLSGSESNMRQKVDPSTGPRRSTRSGTVNRSNQRTGRNGDPL |
| | | LVEIRMKEDWVLLDARGLLRNLRWRESKRGLSCDHEDLSLSGLLAL |
| | | FSGDPVIDPVRNEVVFLYGEGIIPVRSTKPVGTRQSKKLLERQASM |
| | | GPLTLISCDLGQTNLIAGRASAISLTHGSLGVRSSVRIELDPEIIKSFE |
| | | RLRKDADRLETEILTAAKETLSDEQRGEVNSHEKDSPQTAKASLCR |
| | | ELGLHPPSLPWGQMGPSTTFIADMLISHGRDDDAFLSHGEFPTLEK |
| | | RKKFDKRFCLESRPLLSSETRKALNESLWEVKRTSSEYARLSQRKK |
| | | EMARRAVNFVVEISRRKTGLSNVIVNIEDLNVRIFHGGGKQAPGWD |
| | | GFFRPKSENRWFIQAIHKAFSDLAAHHGIPVIESDPQRTSMTCPEC |
| | | GHCDSKNRNGVRFLCKGCGASMDADFDAACRNLERVALTGKPMP |
| | | KPSTSCERLLSATTGKVCSDHSLSHDAIEKAS |
| Casphi-5 | 289 | MSSLPTPLELLKQKHADLFKGLQFSSKDNKMAGKVLKKDGEEAALA |
| polypeptide | | FLSERGVSRGELPNFRPPAKTLVVAQSRPFEEFPIYRVSEAIQLYVY |
| sequence | | SLSVKELETVPSGSSTKKEHQRFFQDSSVPDFGYTSVQGLNKIFGL |
| | | ARGIYLGVITRGENQLQKAKSKHEALNKKRRASGEAETEFDPTPYE |
| | | YMTPERKLAKPPGVNHSIMCYVDISVDEFDFRNPDGIVLPSEYAGY |
| | | CREINTAIEKGTVDRLGHLKGGPGYIPGHQRKESTTEGPKINFRKG |
| | | RIRRSYTALYAKRDSRRVRQGKLALPSYRHHMMRLNSNAESAILAV |
| | | IFFGKDWWVFDLRGLLRNVRWRNLFVDGSTPSTLLGMFGDPVIDPK |
| | | RGVVAFCYKEQIVPVVSKSITKMVKAPELLNKLYLKSEDPLVLVAIDL |
| | | GQTNPVGVGVYRVMNASLDYEVVTRFALESELLREIESYRQRTNAF |
| | | EAQIRAETFDAMTSEEQEEITRVRAFSASKAKENVCHRFGMPVDAV |
| | | DWATMGSNTIHIAKWVMRHGDPSLVEVLEYRKDNEIKLDKNGVPK |
| | | KVKLTDKRIANLTSIRLRFSQETSKHYNDTMWELRRKHPVYQKLSK |
| | | SKADFSRRVVNSIIRRVNHLVPRARIVFIIEDLKNLGKVFHGSGKREL |
| | | GWDSYFEPKSENRWFIQVLHKAFSETGKHKGYYIIECWPNWTSCT |
| | | CPKCSCCDSENRHGEVFRCLACGYTCNTDFGTAPDNLVKIATTGK |
| | | GLPGPKKRCKGSSKGKNPKIARSSETGVSVTESGAPKVKKSSPTQ |
| | | TSQSSSQSAP |
| Casphi-6 | 290 | MNKIEKEKTPLAKLMNENFAGLRFPFAIIKQAGKKLLKEGELKTIEYM |
| polypeptide | | TGKGSIEPLPNFKPPVKCLIVAKRRDLKYFPICKASCEIQSYVYSLNY |
| sequence | | KDFMDYFSTPMTSQKQHEEFFKKSGLNIEYQNVAGLNLIFNNVKNT |
| | | YNGVILKVKNRNEKLKKKAIKNNYEFEEIKTFNDDGCLINKPGINNVI |
| | | YCFQSISPKILKNITHLPKEYNDYDCSVDRNIIQKYVSRLDIPESQPG |
| | | HVPEWQRKLPEFNNTNNPRRRRKWYSNGRNISKGYSVDQVNQAK |
| | | IEDSLLAQIKIGEDWIILDIRGLLRDLNRRELISYKNKLTIKDVLGFFSD |
| | | YPIIDIKKNLVTFCYKEGVIQVVSQKSIGNKKSKQLLEKLIENKPIALVS |
| | | IDLGQTNPVSVKISKLNKINNKISIESFTYRFLNEEILKEIEKYRKDYDK |
| | | LELKLINEA |
| Casphi-7 | 291 | MSNTAVSTREHMSNKTTPPSPLSLLLRAHFPGLKFESQDYKIAGKK |
| polypeptide | | LRDGGPEAVISYLTGKGQAKLKDVKPPAKAFVIAQSRPFIEWDLVRV |
| sequence | | SRQIQEKIFGIPATKGRPKQDGLSETAFNEAVASLEVDGKSKLNEET |
| | | RAAFYEVLGLDAPSLHAQAQNALIKSAISIREGVLKKVENRNEKNLS |
| | | KTKRRKEAGEEATFVEEKAHDERGYLIHPPGVNQTIPGYQAVVIKS |
| | | CPSDFIGLPSGCLAKESAEALTDYLPHDRMTIPKGQPGYVPEWQHP |
| | | LLNRRKNRRRRDWYSASLNKPKATCSKRSGTPNRKNSRTDQIQSG |
| | | RFKGAIPVLMRFQDEWWIIDIRGLLRNARYRKLLKEKSTIPDLLSLFT |
| | | GDPSIDMRQGVCTFIYKAGQACSAKMVKTKNAPEILSELTKSGPVV |
| | | LVSIDLGQTNPIAAKVSRVTQLSDGQLSHETLLRELLSNDSSDGKEI |
| | | ARYRVASDRLRDKLANLAVERLSPEHKSEILRAKNDTPALCKARVC |
| | | AALGLNPEMIAWDKMTPYTEFLATAYLEKGGDRKVATLKPKNRPE |
| | | MLRRDIKFKGTEGVRIEVSPEAAEAYREAQWDLQRTSPEYLRLSTW |
| | | KQELTKRILNQLRHKAAKSSQCEVVVMAFEDLNIKMMHGNGKWAD |
| | | GGWDAFFIKKRENRWFMQAFHKSLTELGAHKGVPTIEVTPHRTSIT |
| | | CTKCGHCDKANRDGERFACQKCGFVAHADLEIATDNIERVALTGKP |
| | | MPKPESERSGDAKKSVGARKAAFKPEEDAEAAE |
| Casphi-8 | 292 | MIKPTVSQFLTPGFKLIRNHSRTAGLKLKNEGEEACKKFVRENEIPK |
| polypeptide | | DECPNFQGGPAIANIIAKSREFTEWEIYQSSLAIQEVIFTLPKDKLPE |
| sequence | | PILKEEWRAQWLSEHGLDTVPYKEAAGLNLIIKNAVNTYKGVQVKV |
| | | DNKNKNNLAKINRKNEIAKLNGEQEISFEEIKAFDDKGYLLQKPSPN |
| | | KSIYCYQSVSPKPFITSKYHNVNLPEEYIGYYRKSNEPIVSPYQFDRL |
| | | RIPIGEPGYVPKWQYTFLSKKENKRRKLSKRIKNVSPILGIICIKKDW |
| | | CVFDMRGLLRTNHWKKYHKPTDSINDLFDYFTGDPVIDTKANVVRF |
| | | RYKMENGIVNYKPVREKKGKELLENICDQNGSCKLATVDVGQNNP |
| | | VAIGLFELKKVNGELTKTLISRHPTPIDFCNKITAYRERYDKLESSIKL |
| | | DAIKQLTSEQKIEVDNYNNNFTPQNTKQIVCSKLNINPNDLPWDKMI |
| | | SGTHFISEKAQVSNKSEIYFTSTDKGKTKDVMKSDYKWFQDYKPKL |
| | | SKEVRDALSDIEWRLRRESLEFNKLSKSREQDARQLANWISSMCD |
| | | VIGIENLVKKNNFFGGSGKREPGWDNFYKPKKENRWWINAIHKALT |
| | | ELSQNKGKRVILLPAMRTSITCPKCKYCDSKNRNGEKFNCLKCGIEL |
| | | NADIDVATENLATVAITAQSMPKPTCERSGDAKKPVRARKAKAPEF |
| | | HDKLAPSYTVVLREAV |
| Casphi-9 | 293 | MRSSREIGDKILMRQPAEKTAFQVFRQEVIGTQKLSGGDAKTAGRL |
| polypeptide | | YKQGKMEAAREWLLKGARDDVPPNFQPPAKCLVVAVSHPFEEWDI |
| sequence | | SKTNHDVQAYIYAQPLQAEGHLNGLSEKWEDTSADQHKLWFEKTG |
| | | VPDRGLPVQAINKIAKAAVNRAFGVVRKVENRNEKRRSRDNRIAEH |
| | | NRENGLTEVVREAPEVATNADGFLLHPPGIDPSILSYASVSPVPYNS |
| | | SKHSFVRLPEEYQAYNVEPDAPIPQFVVEDRFAIPPGQPGYVPEW |
| | | QRLKCSTNKHRRMRQWSNQDYKPKAGRRAKPLEFQAHLTRERAK |
| | | GALLVVMRIKEDWWVFDVRGLLRNVEWRKVLSEEAREKLTLKGLLD |
| | | LFTGDPVIDTKRGIVTFLYKAEITKILSKRTVKTKNARDLLLRLTEPGE |
| | | DGLRREVGLVAVDLGQTHPIAAAIYRIGRTSAGALESTVLHRQGLRE |
| | | DQKEKLKEYRKRHTALDSRLRKEAFETLSVEQQKEIVTVSGSGAQI |
| | | TKDKVCNYLGVDPSTLPWEKMGSYTHFISDDFLRRGGDPNIVHFD |
| | | RQPKKGKVSKKSQRIKRSDSQWWGRMRPRLSQETAKARMEADWA |
| | | AQNENEEYKRLARSKQELARWCVNTLLQNTRCITQCDEIVVVIEDL |
| | | NVKSLHGKGAREPGWDNFFTPKTENRWFIQILHKTFSELPKHRGE |
| | | HVIEGCPLRTSITCPACSYCDKNSRNGEKFVCVACGATFHADFEVA |
| | | TYNLVRLATTGMPMPKSLERQGGGEKAGGARKARKKAKQVEKIVV |
| | | QANANVTMNGASLHSP |
| Casphi-10 | 294 | MDMLDTETNYATETPAQQQDYSPKPPKKAQRAPKGFSKKARPEKK |
| polypeptide | | PPKPITLFTQKHFSGVRFLKRVIRDASKILKLSESRTITFLEQAIERDG |
| sequence | | SAPPDVTPPVHNTIMAVTRPFEEWPEVILSKALQKHCYALTKKIKIKT |
| | | WPKKGPGKKCLAAWSARTKIPLIPGQVQATNGLFDRIGSIYDGVEK |
| | | KVTNRNANKKLEYDEAIKEGRNPAVPEYETAYNIDGTLINKPGYNPN |
| | | LYITQSRTPRLITEADRPLVEKILWQMVEKKTQSRNQARRARLEKAA |
| | | HLQGLPVPKFVPEKVDRSQKIEIRIIDPLDKIEPYMPQDRMAIKASQD |
| | | GHVPYWQRPFLSKRRNRRVRAGWGKQVSSIQAWLTGALLVIVRLG |
| | | NEAFLADIRGALRNAQWRKLLKPDATYQSLFNLFTGDPVVNTRTNH |
| | | LTMAYREGVVNIVKSRSFKGRQTREHLLTLLGQGKTVAGVSFDLGQ |
| | | KHAAGLLAAHFGLGEDGNPVFTPIQACFLPQRYLDSLTNYRNRYDA |
| | | LTLDMRRQSLLALTPAQQQEFADAQRDPGGQAKRACCLKLNLNPD |
| | | EIRWDLVSGISTMISDLYIERGGDPRDVHQQVETKPKGKRKSEIRIL |
| | | KIRDGKWAYDFRPKIADETRKAQREQLWKLQKASSEFERLSRYKINI |
| | | ARAIANWALQWGRELSGCDIVIPVLEDLNVGSKFFDGKGKWLLGW |
| | | DNRFTPKKENRWFIKVLHKAVAELAPHRGVPVYEVMPHRTSMTCP |
| | | ACHYCHPTNREGDRFECQSCHVVKNTDRDVAPYNILRVAVEGKTL |
| | | DRWQAEKKPQAEPDRPMILIDNQES |
| >sp\|P14739\|UNGI_ | 106 | MTNLSDIIEKETGKQLVIQESILMLPEEVEEVIGNKPESDILVHTAYDE |
| BPPB2 Uracil-DNA | | STDENVMLLTSD APEYKPWALVIQDSNGENKIKML |
| glycosylase | | |
| inhibitor | | |
| Cas12b/C2c1 | 258 | MAVKSIKVKLRLDDMPEIRAGLWKLHKEVNAGVRYYTEWLSLLRQE |
| | | NLYRRSPNGDGEQECDKTAEECKAELLERLRARQVENGHRGPAG |
| | | SDDELLQLARQLYELLVPQAIGAKGDAQQIARKFLSPLADKDAVGG |
| | | LGIAKAGNKPRWVRMREAGEPGWEEEKEKAETRKSADRTADVLR |
| | | ALADFGLKPLMRVYTDSEMSSVEWKPLRKGQAVRTWDRDMFQQA |
| | | IERMMSWESWNQRVGQEYAKLVEQKNRFEQKNFVGQEHLVHLVN |
| | | QLQQDMKEASPGLESKEQTAHYVTGRALRGSDKVFEKWGKLAPD |
| | | APFDLYDAEIKNVQRRNTRRFGSHDLFAKLAEPEYQALWREDASFL |
| | | TRYAVYNSILRKLNHAKMFATFTLPDATAHPIWTRFDKLGGNLHQY |
| | | TFLFNEFGERRHAIRFHKLLKVENGVAREVDDVTVPISMSEQLDNLL |
| | | PRDPNEPIALYFRDYGAEQHFTGEFGGAKIQCRRDQLAHMHRRRG |
| | | ARDVYLNVSVRVQSQSEARGERRPPYAAVFRLVGDNHRAFVHFDK |
| | | LSDYLAEHPDDGKLGSEGLLSGLRVMSVDLGLRTSASISVFRVARK |
| | | DELKPNSKGRVPFFFPIKGNDNLVAVHERSQLLKLPGETESKDLRAI |
| | | REERQRTLRQLRTQLAYLRLLVRCGSEDVGRRERSWAKLIEQPVD |
| | | AANHMTPDWREAFENELQKLKSLHGICSDKEWMDAVYESVRRVW |
| | | RHMGKQVRDWRKDVRSGERPKIRGYAKDVVGGNSIEQIEYLERQY |
| | | KFLKSWSFFGKVSGQVIRAEKGSRFAITLREHIDHAKEDRLKKLADR |
| | | IIMEALGYVYALDERGKGKWWAKYPPCQLILLEELSEYQFNNDRPPS |
| | | ENNQLMQWSHRGVFQELINQAQVHDLLVGTMYAAFSSRFDARTG |
| | | APGIRCRRVPARCTQEHNPEPFPWWLNKFVVEHTLDACPLRADDLI |
| | | PTGEGEIFVSPFSAEEGDFHQIHADLNAAQNLQQRLWSDFDISQIRL |
| | | RCDWGEVDGELVLIPRLTGKRTADSYSNKVFYTNTGVTYYERERG |
| | | KKRRKVFAQEKLSEEEAELLVEADEAREKSVVLMRDPSGIINRGNW |
| | | TRQKEFWSMV NQRIEGYLVKQIRSRVPLQDSACENTGDI |
| high fidelity | 1423 | MDKKYSIGLAIGTNSVGWAVITDEYKVPSKKFKVLGNTDRHSIKKNLI |
| Cas9 polypeptide | | GALLFDSGETAEATRLKRTARRRYTRRKNRICYLQEIFSNEMAKVD |
| sequence | | DSFFHRLEESFLVEEDKKHERHPIFGNIVDEVAYHEKYPTIYHLRKK |
| | | LVDSTDKADLRLIYLALAHMIKFRGHFLIEGDLNPDNSDVDKLFIQLV |
| | | QTYNQLFEENPINASGVDAKAILSARLSKSRRLENLIAQLPGEKKNG |
| | | LFGNLIALSLGLTPNFKSNFDLAEDAKLQLSKDTYDDDLDNLLAQIG |
| | | DQYADLFLAAKNLSDAILLSDILRVNTEITKAPLSASMIKRYDEHHQD |
| | | LTLLKALVRQQLPEKYKEIFFDQSKNGYAGYIDGGASQEEFYKFIKPI |
| | | LEKMDGTEELLVKLNREDLLRKQRTFDNGSIPHQIHLGELHAILRRQ |
| | | EDFYPFLKDNREKIEKILTFRIPYYVGPLARGNSRFAWMTRKSEETIT |
| | | PWNFEEVVDKGASAQSFIERMTAFDKNLPNEKVLPKHSLLYEYFTV |
| | | YNELTKVKYVTEGMRKPAFLSGEQKKAIVDLLFKTNRKVTVKQLKE |
| | | DYFKKIECFDSVEISGVEDRFNASLGTYHDLLKIIKDKDFLDNEENED |
| | | ILEDIVLTLTLFEDREMIEERLKTYAHLFDDKVMKQLKRRRYTGWGA |
| | | LSRKLINGIRDKQSGKTILDFLKSDGFANRNFMALIHDDSLTFKEDIQ |
| | | KAQVSGQGDSLHEHIANLAGSPAIKKGILQTVKVVDELVKVMGRHK |
| | | PENIVIEMARENQTTQKGQKNSRERMKRIEEGIKELGSQILKEHPVE |
| | | NTQLQNEKLYLYYLQNGRDMYVDQELDINRLSDYDVDHIVPQSFLK |
| | | DDSIDNKVLTRSDKNRGKSDNVPSEEVVKKMKNYWRQLLNAKLITQ |
| | | RKFDNLTKAERGGLSELDKAGFIKRQLVETRAITKHVAQILDSRMNT |
| | | KYDENDKLIREVKVITLKSKLVSDFRKDFQFYKVREINNYHHAHDAY |
| | | LNAVVGTALIKKYPKLESEFVYGDYKVYDVRKMIAKSEQEIGKATAK |
| | | YFFYSNIMNFFKTEITLANGEIRKRPLIETNGETGEIVWDKGRDFATV |
| | | RKVLSMPQVNIVKKTEVQTGGFSKESILPKRNSDKLIARKKDWDPK |
| | | KYGGFDSPTVAYSVLVVAKVEKGKSKKLKSVKELLGITIMERSSFEK |
| | | NPIDFLEAKGYKEVKKDLIIKLPKYSLFELENGRKRMLASAGELQKG |
| | | NELALPSKYVNFLYLASHYEKLKGSPEDNEQKQLFVEQHKHYLDEII |
| | | EQISEFSKRVILADANLDKVLSAYNKHRDKPIREQAENIIHLFTLTNLG |
| | | APAAFKYFDTTIDRKRYTSTKEVLDATLIHQSITGLYETRIDLSQLGG |
| | | D |
| Wt Cas9 domain | 233 | ATGGATAAAAAGTATTCTATTGGTTTAGACATCGGCACTAATTCC |
| | | GTTGGATGGGCTGTCATAACCGATGAATACAAAGTACCTTCAAA |
| | | GAAATTTAAGGTGTTGGGGAACACAGACCGTCATTCGATTAAAA |
| | | AGAATCTTATCGGTGCCCTCCTATTCGATAGTGGCGAAACGGCA |
| | | GAGGCGACTCGCCTGAAACGAACCGCTCGGAGAAGGTATACAC |
| | | GTCGCAAGAACCGAATATGTTACTTACAAGAAATTTTTAGCAATG |
| | | AGATGGCCAAAGTTGACGATTCTTTCTTTCACCGTTTGGAAGAGT |
| | | CCTTCCTTGTCGAAGAGGACAAGAAACATGAACGGCACCCCATC |
| | | TTTGGAAACATAGTAGATGAGGTGGCATATCATGAAAAGTACCC |
| | | AACGATTTATCACCTCAGAAAAAAGCTAGTTGACTCAACTGATAA |
| | | AGCGGACCTGAGGTTAATCTACTTGGCTCTTGCCCATATGATAA |
| | | AGTTCCGTGGGCACTTTCTCATTGAGGGTGATCTAAATCCGGAC |
| | | AACTCGGATGTCGACAAACTGTTCATCCAGTTAGTACAAACCTAT |
| | | AATCAGTTGTTTGAAGAGAACCCTATAAATGCAAGTGGCGTGGA |
| | | TGCGAAGGCTATTCTTAGCGCCCGCCTCTCTAAATCCCGACGGC |
| | | TAGAAAACCTGATCGCACAATTACCCGGAGAGAAGAAAAATGGG |
| | | TTGTTCGGTAACCTTATAGCGCTCTCACTAGGCCTGACACCAAA |
| | | TTTTAAGTCGAACTTCGACTTAGCTGAAGATGCCAAATTGCAGCT |
| | | TAGTAAGGACACGTACGATGACGATCTCGACAATCTACTGGCAC |
| | | AAATTGGAGATCAGTATGCGGACTTATTTTTGGCTGCCAAAAACC |
| | | TTAGCGATGCAATCCTCCTATCTGACATACTGAGAGTTAATACTG |
| | | AGATTACCAAGGCGCCGTTATCCGCTTCAATGATCAAAAGGTAC |
| | | GATGAACATCACCAAGACTTGACACTTCTCAAGGCCCTAGTCCG |
| | | TCAGCAACTGCCTGAGAAATATAAGGAAATATTCTTTGATCAGTC |
| | | GAAAAACGGGTACGCAGGTTATATTGACGGCGGAGCGAGTCAA |
| | | GAGGAATTCTACAAGTTTATCAAACCCATATTAGAGAAGATGGAT |
| | | GGGACGGAAGAGTTGCTTGTAAAACTCAATCGCGAAGATCTACT |
| | | GCGAAAGCAGCGGACTTTCGACAACGGTAGCATTCCACATCAAA |
| | | TCCACTTAGGCGAATTGCATGCTATACTTAGAAGGCAGGAGGAT |
| | | TTTTATCCGTTCCTCAAAGACAATCGTGAAAAGATTGAGAAAATC |
| | | CTAACCTTTCGCATACCTTACTATGTGGGACCCCTGGCCCGAGG |
| | | GAACTCTCGGTTCGCATGGATGACAAGAAAGTCCGAAGAAACGA |
| | | TTACTCCATGGAATTTTGAGGAAGTTGTCGATAAAGGTGCGTCA |
| | | GCTCAATCGTTCATCGAGAGGATGACCAACTTTGACAAGAATTTA |
| | | CCGAACGAAAAAGTATTGCCTAAGCACAGTTTACTTTACGAGTAT |
| | | TTCACAGTGTACAATGAACTCACGAAAGTTAAGTATGTCACTGAG |
| | | GGCATGCGTAAACCCGCCTTTCTAAGCGGAGAACAGAAGAAAG |
| | | CAATAGTAGATCTGTTATTCAAGACCAACCGCAAAGTGACAGTTA |
| | | AGCAATTGAAAGAGGACTACTTTAAGAAAATTGAATGCTTCGATT |
| | | CTGTCGAGATCTCCGGGGTAGAAGATCGATTTAATGCGTCACTT |
| | | GGTACGTATCATGACCTCCTAAAGATAATTAAAGATAAGGACTTC |
| | | CTGGATAACGAAGAGAATGAAGATATCTTAGAAGATATAGTGTTG |
| | | ACTCTTACCCTCTTTGAAGATCGGGAAATGATTGAGGAAAGACT |
| | | AAAAACATACGCTCACCTGTTCGACGATAAGGTTATGAAACAGTT |
| | | AAAGAGGCGTCGCTATACGGGCTGGGGACGATTGTCGCGGAAA |
| | | CTTATCAACGGGATAAGAGACAAGCAAAGTGGTAAAACTATTCT |
| | | CGATTTTCTAAAGAGCGACGGCTTCGCCAATAGGAACTTTATGC |
| | | AGCTGATCCATGATGACTCTTTAACCTTCAAAGAGGATATACAAA |
| | | AGGCACAGGTTTCCGGACAAGGGGACTCATTGCACGAACATATT |
| | | GCGAATCTTGCTGGTTCGCCAGCCATCAAAAAGGGCATACTCCA |
| | | GACAGTCAAAGTAGTGGATGAGCTAGTTAAGGTCATGGGACGTC |
| | | ACAAACCGGAAAACATTGTAATCGAGATGGCACGCGAAAATCAA |
| | | ACGACTCAGAAGGGGCAAAAAAACAGTCGAGAGCGGATGAAGA |
| | | GAATAGAAGAGGGTATTAAAGAACTGGGCAGCCAGATCTTAAAG |
| | | GAGCATCCTGTGGAAAATACCCAATTGCAGAACGAGAAACTTTA |
| | | CCTCTATTACCTACAAAATGGAAGGGACATGTATGTTGATCAGG |
| | | AACTGGACATAAACCGTTTATCTGATTACGACGTCGATCACATTG |
| | | TACCCCAATCCTTTTTGAAGGACGATTCAATCGACAATAAAGTGC |
| | | TTACACGCTCGGATAAGAACCGAGGGAAAAGTGACAATGTTCCA |
| | | AGCGAGGAAGTCGTAAAGAAAATGAAGAACTATTGGCGGCAGCT |
| | | CCTAAATGCGAAACTGATAACGCAAAGAAAGTTCGATAACTTAAC |
| | | TAAAGCTGAGAGGGGTGGCTTGTCTGAACTTGACAAGGCCGGA |
| | | TTTATTAAACGTCAGCTCGTGGAAACCCGCCAAATCACAAAGCA |
| | | TGTTGCACAGATACTAGATTCCCGAATGAATACGAAATACGACG |
| | | AGAACGATAAGCTGATTCGGGAAGTCAAAGTAATCACTTTAAAGT |
| | | CAAAATTGGTGTCGGACTTCAGAAAGGATTTTCAATTCTATAAAG |
| | | TTAGGGAGATAAATAACTACCACCATGCGCACGACGCTTATCTT |
| | | AATGCCGTCGTAGGGACCGCACTCATTAAGAAATACCCGAAGCT |
| | | AGAAAGTGAGTTTGTGTATGGTGATTACAAAGTTTATGACGTCCG |
| | | TAAGATGATCGCGAAAAGCGAACAGGAGATAGGCAAGGCTACA |
| | | GCCAAATACTTCTTTTATTCTAACATTATGAATTTCTTTAAGACGG |
| | | AAATCACTCTGGCAAACGGAGAGATACGCAAACGACCTTTAATT |
| | | GAAACCAATGGGGAGACAGGTGAAATCGTATGGGATAAGGGCC |
| | | GGGACTTCGCGACGGTGAGAAAAGTTTTGTCCATGCCCCAAGTC |
| | | AACATAGTAAAGAAAACTGAGGTGCAGACCGGAGGGTTTTCAAA |
| | | GGAATCGATTCTTCCAAAAAGGAATAGTGATAAGCTCATCGCTC |
| | | GTAAAAAGGACTGGGACCCGAAAAAGTACGGTGGCTTCGATAG |
| | | CCCTACAGTTGCCTATTCTGTCCTAGTAGTGGCAAAAGTTGAGA |
| | | AGGGAAAATCCAAGAAACTGAAGTCAGTCAAAGAATTATTGGGG |
| | | ATAACGATTATGGAGCGCTCGTCTTTTGAAAAGAACCCCATCGA |
| | | CTTCCTTGAGGCGAAAGGTTACAAGGAAGTAAAAAAGGATCTCA |
| | | TAATTAAACTACCAAAGTATAGTCTGTTTGAGTTAGAAAATGGCC |
| | | GAAAACGGATGTTGGCTAGCGCCGGAGAGCTTCAAAAGGGGAA |
| | | CGAACTCGCACTACCGTCTAAATACGTGAATTTCCTGTATTTAGC |
| | | GTCCCATTACGAGAAGTTGAAAGGTTCACCTGAAGATAACGAAC |
| | | AGAAGCAACTTTTTGTTGAGCAGCACAAACATTATCTCGACGAAA |
| | | TCATAGAGCAAATTTCGGAATTCAGTAAGAGAGTCATCCTAGCT |
| | | GATGCCAATCTGGACAAAGTATTAAGCGCATACAACAAGCACAG |
| | | GGATAAACCCATACGTGAGCAGGCGGAAAATATTATCCATTTGT |
| | | TTACTCTTACCAACCTCGGCGCTCCAGCCGCATTCAAGTATTTTG |
| | | ACACAACGATAGATCGCAAACGATACACTTCTACCAAGGAGGTG |
| | | CTAGACGCGACACTGATTCACCAATCCATCACGGGATTATATGA |
| | | AACTCGGATAGATTTGTCACAGCTTGGGGGTGACGGATCCCCCA |
| | | AGAAGAAGAGGAAAGTCTCGAGCGACTACAAAGACCATGACGG |
| | | TGATTATAAAGATCATGACATCGATTACAAGGATGACGATGACAA |
| | | GGCTGCAGGA |
| wild-type Cas9 | 234 | MDKKYSIGLAIGTNSVGWAVITDEYKVPSKKFKVLGNTDRHSIKKNLI |
| polypeptide | | GALLFDSGETAEATRLKRTARRRYTRRKNRICYLQEIFSNEMAKVD |
| sequence | | DSFFHRLEESFLVEEDKKHERHPIFGNIVDEVAYHEKYPTIYHLRKK |
| | | LVDSTDKADLRLIYLALAHMIKFRGHFLIEGDLNPDNSDVDKLFIQLV |
| | | QTYNQLFEENPINASGVDAKAILSARLSKSRRLENLIAQLPGEKKNG |
| | | LFGNLIALSLGLTPNFKSNFDLAEDAKLQLSKDTYDDDLDNLLAQIG |
| | | DQYADLFLAAKNLSDAILLSDILRVNTEITKAPLSASMIKRYDEHHQD |
| | | LTLLKALVRQQLPEKYKEIFFDQSKNGYAGYIDGGASQEEFYKFIKPI |
| | | LEKMDGTEELLVKLNREDLLRKQRTFDNGSIPHQIHLGELHAILRRQ |
| | | EDFYPFLKDNREKIEKILTFRIPYYVGPLARGNSRFAWMTRKSEETIT |
| | | PWNFEEVVDKGASAQSFIERMTNFDKNLPNEKVLPKHSLLYEYFTV |
| | | YNELTKVKYVTEGMRKPAFLSGEQKKAIVDLLFKTNRKVTVKQLKE |
| | | DYFKKIECFDSVEISGVEDRFNASLGTYHDLLKIIKDKDFLDNEENED |
| | | ILEDIVLTLTLFEDREMIEERLKTYAHLFDDKVMKQLKRRRYTGWGR |
| | | LSRKLINGIRDKQSGKTILDFLKSDGFANRNFMQLIHDDSLTFKEDIQ |
| | | KAQVSGQGDSLHEHIANLAGSPAIKKGILQTVKVVDELVKVMGRHK |
| | | PENIVIEMARENQTTQKGQKNSRERMKRIEEGIKELGSQILKEHPVE |
| | | NTQLQNEKLYLYYLQNGRDMYVDQELDINRLSDYDVDHIVPQSFLK |
| | | DDSIDNKVLTRSDKNRGKSDNVPSEEVVKKMKNYWRQLLNAKLITQ |
| | | RKFDNLTKAERGGLSELDKAGFIKRQLVETRQITKHVAQILDSRMNT |
| | | KYDENDKLIREVKVITLKSKLVSDFRKDFQFYKVREINNYHHAHDAY |
| | | LNAVVGTALIKKYPKLESEFVYGDYKVYDVRKMIAKSEQEIGKATAK |
| | | YFFYSNIMNFFKTEITLANGEIRKRPLIETNGETGEIVWDKGRDFATV |
| | | RKVLSMPQVNIVKKTEVQTGGFSKESILPKRNSDKLIARKKDWDPK |
| | | KYGGFDSPTVAYSVLVVAKVEKGKSKKLKSVKELLGITIMERSSFEK |
| | | NPIDFLEAKGYKEVKKDLIIKLPKYSLFELENGRKRMLASAGELQKG |
| | | NELALPSKYVNFLYLASHYEKLKGSPEDNEQKQLFVEQHKHYLDEII |
| | | EQISEFSKRVILADANLDKVLSAYNKHRDKPIREQAENIIHLFTLTNLG |
| | | APAAFKYFDTTIDRKRYTSTKEVLDATLIHQSITGLYETRIDLSQLGG |
| | | D |
| PAM-binding | 1304 | MDKKYSIGLAIGTNSVGWAVITDEYKVPSKKFKVLGNTDRHSIKKNLI |
| SpEQR Cas9 | | GALLFDSGETAEATRLKRTARRRYTRRKNRICYLQEIFSNEMAKVD |
| polypeptide | | DSFFHRLEESVLVEEDKKHERHPIFGNIVDEVAYHEKYPTIYHLRKK |
| sequence | | LVDSTDKADLRLIYLALAHMIKFRGHFLIEGDLNPDNSDVDKLFIQLV |
| | | QTYNQLFEENPINASGVDAKAILSARLSKSRRLENLIAQLPGEKKNG |
| | | LFGNLIALSLGLTPNFKSNFDLAEDAKLQLSKDTYDDDLDNLLAQIG |
| | | DQYADLFLAAKNLSDAILLSDILRVNTEITKAPLSASMIKRYDEHHQD |
| | | LTLLKALVRQQLPEKYKEIFFDQSKNGYAGYIDGGASQEEFYKFIKPI |
| | | LEKMDGTEELLVKLNREDLLRKQRTFDNGSIPHQIHLGELHAILRRQ |
| | | EDFYPFLKDNREKIEKILTFRIPYYVGPLARGNSRFAWMTRKSEETIT |
| | | PWNFEEVVDKGASAQSFIERMTNFDKNLPNEKVLPKHSLLYEYFTV |
| | | YNELTKVKYVTEGMRKPAFLSGEQKKAIVDLLFKTNRKVTVKQLKE |
| | | DYFKKIECFDSVEISGVEDRFNASLGTYHDLLKIIKDKDFLDNEENED |
| | | ILEDIVLTLTLFEDREMIEERLKTYAHLFDDKVMKQLKRRRYTGWGR |
| | | LSRKLINGIRDKQSGKTILDFLKSDGFANRNFMQLIHDDSLTFKEDIQ |
| | | KAQVSGQGDSLHEHIANLAGSPAIKKGILQTVKVVDELVKVMGRHK |
| | | PENIVIEMARENQTTQKGQKNSRERMKRIEEGIKELGSQILKEHPVE |
| | | NTQLQNEKLYLYYLQNGRDMYVDQELDINRLSDYDVDHIVPQSFLK |
| | | DDSIDNKVLTRSDKNRGKSDNVPSEEVVKKMKNYWRQLLNAKLITQ |
| | | RKFDNLTKAERGGLSELDKAGFIKRQLVETRQITKHVAQILDSRMNT |
| | | KYDENDKLIREVKVITLKSKLVSDFRKDFQFYKVREINNYHHAHDAY |
| | | LNAVVGTALIKKYPKLESEFVYGDYKVYDVRKMIAKSEQEIGKATAK |
| | | YFFYSNIMNFFKTEITLANGEIRKRPLIETNGETGEIVWDKGRDFATV |
| | | RKVLSMPQVNIVKKTEVQTGGFSKESILPKRNSDKLIARKKDWDPK |
| | | KYGGFESPTVAYSVLVVAKVEKGKSKKLKSVKELLGITIMERSSFEK |
| | | NPIDFLEAKGYKEVKKDLIIKLPKYSLFELENGRKRMLASAGELQKG |
| | | NELALPSKYVNFLYLASHYEKLKGSPEDNEQKQLFVEQHKHYLDEII |
| | | EQISEFSKRVILADANLDKVLSAYNKHRDKPIREQAENIIHLFTLTNLG |
| | | APAAFKYFDTTIDRKQYRSTKEVLDATLIHQSITGLYETRIDLSQLGG |
| | | D |
| PAM-binding | 1305 | MDKKYSIGLAIGTNSVGWAVITDEYKVPSKKFKVLGNTDRHSIKKNLI |
| SpVQR Cas9 | | GALLFDSGETAEATRLKRTARRRYTRRKNRICYLQEIFSNEMAKVD |
| polypeptide | | DSFFHRLEESFLVEEDKKHERHPIFGNIVDEVAYHEKYPTIYHLRKK |
| sequence | | LVDSTDKADLRLIYLALAHMIKFRGHFLIEGDLNPDNSDVDKLFIQLV |
| | | QTYNQLFEENPINASGVDAKAILSARLSKSRRLENLIAQLPGEKKNG |
| | | LFGNLIALSLGLTPNFKSNFDLAEDAKLQLSKDTYDDDLDNLLAQIG |
| | | DQYADLFLAAKNLSDAILLSDILRVNTEITKAPLSASMIKRYDEHHQD |
| | | LTLLKALVRQQLPEKYKEIFFDQSKNGYAGYIDGGASQEEFYKFIKPI |
| | | LEKMDGTEELLVKLNREDLLRKQRTFDNGSIPHQIHLGELHAILRRQ |
| | | EDFYPFLKDNREKIEKILTFRIPYYVGPLARGNSRFAWMTRKSEETIT |
| | | PWNFEEVVDKGASAQSFIERMTNFDKNLPNEKVLPKHSLLYEYFTV |
| | | YNELTKVKYVTEGMRKPAFLSGEQKKAIVDLLFKTNRKVTVKQLKE |
| | | DYFKKIECFDSVEISGVEDRFNASLGTYHDLLKIIKDKDFLDNEENED |
| | | ILEDIVLTLTLFEDREMIEERLKTYAHLFDDKVMKQLKRRRYTGWGR |
| | | LSRKLINGIRDKQSGKTILDFLKSDGFANRNFMQLIHDDSLTFKEDIQ |
| | | KAQVSGQGDSLHEHIANLAGSPAIKKGILQTVKVVDELVKVMGRHK |
| | | PENIVIEMARENQTTQKGQKNSRERMKRIEEGIKELGSQILKEHPVE |
| | | NTQLQNEKLYLYYLQNGRDMYVDQELDINRLSDYDVDHIVPQSFLK |
| | | DDSIDNKVLTRSDKNRGKSDNVPSEEVVKKMKNYWRQLLNAKLITQ |
| | | RKFDNLTKAERGGLSELDKAGFIKRQLVETRQITKHVAQILDSRMNT |
| | | KYDENDKLIREVKVITLKSKLVSDFRKDFQFYKVREINNYHHAHDAY |
| | | LNAVVGTALIKKYPKLESEFVYGDYKVYDVRKMIAKSEQEIGKATAK |
| | | YFFYSNIMNFFKTEITLANGEIRKRPLIETNGETGEIVWDKGRDFATV |
| | | RKVLSMPQVNIVKKTEVQTGGFSKESILPKRNSDKLIARKKDWDPK |
| | | KYGGFVSPTVAYSVLVVAKVEKGKSKKLKSVKELLGITIMERSSFEK |
| | | NPIDFLEAKGYKEVKKDLIIKLPKYSLFELENGRKRMLASAGELQKG |
| | | NELALPSKYVNFLYLASHYEKLKGSPEDNEQKQLFVEQHKHYLDEII |
| | | EQISEFSKRVILADANLDKVLSAYNKHRDKPIREQAENIIHLFTLTNLG |
| | | APAAFKYFDTTIDRKQYRSTKEVLDATLIHQSITGLYETRIDLSQLGG |
| | | D |
| SpVQR Cas9 | 1306 | MDKKYSIGLAIGTNSVGWAVITDEYKVPSKKFKVLGNTDRHSIKKNLI |
| polypeptide | | GALLFDSGETAEATRLKRTARRRYTRRKNRICYLQEIFSNEMAKVD |
| sequence | | DSFFHRLEESFLVEEDKKHERHPIFGNIVDEVAYHEKYPTIYHLRKK |
| | | LVDSTDKADLRLIYLALAHMIKFRGHFLIEGDLNPDNSDVDKLFIQLV |
| | | QTYNQLFEENPINASGVDAKAILSARLSKSRRLENLIAQLPGEKKNG |
| | | LFGNLIALSLGLTPNFKSNFDLAEDAKLQLSKDTYDDDLDNLLAQIG |
| | | DQYADLFLAAKNLSDAILLSDILRVNTEITKAPLSASMIKRYDEHHQD |
| | | LTLLKALVRQQLPEKYKEIFFDQSKNGYAGYIDGGASQEEFYKFIKPI |
| | | LEKMDGTEELLVKLNREDLLRKQRTFDNGSIPHQIHLGELHAILRRQ |
| | | EDFYPFLKDNREKIEKILTFRIPYYVGPLARGNSRFAWMTRKSEETIT |
| | | PWNFEEVVDKGASAQSFIERMTNFDKNLPNEKVLPKHSLLYEYFTV |
| | | YNELTKVKYVTEGMRKPAFLSGEQKKAIVDLLFKTNRKVTVKQLKE |
| | | DYFKKIECFDSVEISGVEDRFNASLGTYHDLLKIIKDKDFLDNEENED |
| | | ILEDIVLTLTLFEDREMIEERLKTYAHLFDDKVMKQLKRRRYTGWGR |
| | | LSRKLINGIRDKQSGKTILDFLKSDGFANRNFMQLIHDDSLTFKEDIQ |
| | | KAQVSGQGDSLHEHIANLAGSPAIKKGILQTVKVVDELVKVMGRHK |
| | | PENIVIEMARENQTTQKGQKNSRERMKRIEEGIKELGSQILKEHPVE |
| | | NTQLQNEKLYLYYLQNGRDMYVDQELDINRLSDYDVDHIVPQSFLK |
| | | DDSIDNKVLTRSDKNRGKSDNVPSEEVVKKMKNYWRQLLNAKLITQ |
| | | RKFDNLTKAERGGLSELDKAGFIKRQLVETRQITKHVAQILDSRMNT |
| | | KYDENDKLIREVKVITLKSKLVSDFRKDFQFYKVREINNYHHAHDAY |
| | | LNAVVGTALIKKYPKLESEFVYGDYKVYDVRKMIAKSEQEIGKATAK |
| | | YFFYSNIMNFFKTEITLANGEIRKRPLIETNGETGEIVWDKGRDFATV |
| | | RKVLSMPQVNIVKKTEVQTGGFSKESILPKRNSDKLIARKKDWDPK |
| | | KYGGFVSPTVAYSVLVVAKVEKGKSKKLKSVKELLGITIMERSSFEK |
| | | NPIDFLEAKGYKEVKKDLIIKLPKYSLFELENGRKRMLASARELQKG |
| | | NELALPSKYVNFLYLASHYEKLKGSPEDNEQKQLFVEQHKHYLDEII |
| | | EQISEFSKRVILADANLDKVLSAYNKHRDKPIREQAENIIHLFTLTNLG |
| | | APAAFKYFDTTIDRKEYRSTKEVLDATLIHQSITGLYETRIDLSQLGG |
| | | D |
| SpyMacCas9 | 1307 | MDKKYSIGLDIGTNSVGWAVITDDYKVPSKKFKVLGNTDRHSIKKNL |
| polypeptide | | IGALLFGSGETAEATRLKRTARRRYTRRKNRICYLQEIFSNEMAKVD |
| sequence | | DSFFHRLEESFLVEEDKKHERHPIFGNIVDEVAYHEKYPTIYHLRKK |
| | | LADSTDKADLRLIYLALAHMIKFRGHFLIEGDLNPDNSDVDKLFIQLV |
| | | QIYNQLFEENPINASRVDAKAILSARLSKSRRLENLIAQLPGEKRNGL |
| | | FGNLIALSLGLTPNFKSNFDLAEDAKLQLSKDTYDDDLDNLLAQIGD |
| | | QYADLFLAAKNLSDAILLSDILRVNSEITKAPLSASMIKRYDEHHQDL |
| | | TLLKALVRQQLPEKYKEIFFDQSKNGYAGYIDGGASQEEFYKFIKPIL |
| | | EKMDGTEELLVKLNREDLLRKQRTFDNGSIPHQIHLGELHAILRRQE |
| | | DFYPFLKDNREKIEKILTFRIPYYVGPLARGNSRFAWMTRKSEETITP |
| | | WNFEEVVDKGASAQSFIERMTNFDKNLPNEKVLPKHSLLYEYFTVY |
| | | NELTKVKYVTEGMRKPAFLSGEQKKAIVDLLFKTNRKVTVKQLKED |
| | | YFKKIECFDSVEISGVEDRFNASLGAYHDLLKIIKDKDFLDNEENEDI |
| | | LEDIVLTLTLFEDRGMIEERLKTYAHLFDDKVMKQLKRRRYTGWGR |
| | | LSRKLINGIRDKQSGKTILDFLKSDGFANRNFMQLIHDDSLTFKEDIQ |
| | | KAQVSGQGHSLHEQIANLAGSPAIKKGILQTVKIVDELVKVMGHKPE |
| | | NIVIEMARENQTTQKGQKNSRERMKRIEEGIKELGSQILKEHPVENT |
| | | QLQNEKLYLYYLQNGRDMYVDQELDINRLSDYDVDHIVPQSFIKDD |
| | | SIDNKVLTRSDKNRGKSDNVPSEEVVKKMKNYWRQLLNAKLITQRK |
| | | FDNLTKAERGGLSELDKAGFIKRQLVETRQITKHVAQILDSRMNTKY |
| | | DENDKLIREVKVITLKSKLVSDFRKDFQFYKVREINNYHHAHDAYLN |
| | | AVVGTALIKKYPKLESEFVYGDYKVYDVRKMIAKSEQEIGKATAKYF |
| | | FYSNIMNFFKTEITLANGEIRKRPLIETNGETGEIVWDKGRDFATVRK |
| | | VLSMPQVNIVKKTEIQTVGQNGGLFDDNPKSPLEVTPSKLVPLKKEL |
| | | NPKKYGGYQKPTTAYPVLLITDTKQLIPISVMNKKQFEQNPVKFLRD |
| | | RGYQQVGKNDFIKLPKYTLVDIGDGIKRLWASSKEIHKGNQLVVSKK |
| | | SQILLYHAHHLDSDLSNDYLQNHNQQFDVLFNEIISFSKKCKLGKEHI |
| | | QKIENVYSNKKNSASIEELAESFIKLLGFTQLGATSPFNFLGVKLNQK |
| | | QYKGKKDYILPCTEGTLIRQSITGLYETRVDLSKIGED |
| CP5 polypeptide | 257 | EIGKATAKYFFYSNIMNFFKTEITLANGEIRKRPLIETNGETGEIVWD |
| sequence | | KGRDFATVRKVLSMPQVNIVKKTEVQTGGFSKESILPKRNSDKLIAR |
| | | KKDWDPKKYGGFMQPTVAYSVLVVAKVEKGKSKKLKSVKELLGITI |
| | | MERSSFEKNPIDFLEAKGYKEVKKDLIIKLPKYSLFELENGRKRMLA |
| | | SAKFLQKGNELALPSKYVNFLYLASHYEKLKGSPEDNEQKQLFVEQ |
| | | HKHYLDEIIEQISEFSKRVILADANLDKVLSAYNKHRDKPIREQAENII |
| | | HLFTLTNLGAPRAFKYFDTTIARKEYRSTKEVLDATLIHQSITGLYET |
| | | RIDLSQLGGDGGSGGSGGSGGSGGSGGSGGMDKKYSIGLAIGTN |
| | | SVGWAVITDEYKVPSKKFKVLGNTDRHSIKKNLIGALLFDSGETAEA |
| | | TRLKRTARRRYTRRKNRICYLQEIFSNEMAKVDDSFFHRLEESFLVE |
| | | EDKKHERHPIFGNIVDEVAYHEKYPTIYHLRKKLVDSTDKADLRLIYL |
| | | ALAHMIKFRGHFLIEGDLNPDNSDVDKLFIQLVQTYNQLFEENPINA |
| | | SGVDAKAILSARLSKSRRLENLIAQLPGEKKNGLFGNLIALSLGLTPN |
| | | FKSNFDLAEDAKLQLSKDTYDDDLDNLLAQIGDQYADLFLAAKNLS |
| | | DAILLSDILRVNTEITKAPLSASMIKRYDEHHQDLTLLKALVRQQLPE |
| | | KYKEIFFDQSKNGYAGYIDGGASQEEFYKFIKPILEKMDGTEELLVK |
| | | LNREDLLRKQRTFDNGSIPHQIHLGELHAILRRQEDFYPFLKDNREK |
| | | IEKILTFRIPYYVGPLARGNSRFAWMTRKSEETITPWNFEEVVDKGA |
| | | SAQSFIERMTNFDKNLPNEKVLPKHSLLYEYFTVYNELTKVKYVTEG |
| | | MRKPAFLSGEQKKAIVDLLFKTNRKVTVKQLKEDYFKKIECFDSVEI |
| | | SGVEDRFNASLGTYHDLLKIIKDKDFLDNEENEDILEDIVLTLTLFED |
| | | REMIEERLKTYAHLFDDKVMKQLKRRRYTGWGRLSRKLINGIRDKQ |
| | | SGKTILDFLKSDGFANRNFMQLIHDDSLTFKEDIQKAQVSGQGDSL |
| | | HEHIANLAGSPAIKKGILQTVKVVDELVKVMGRHKPENIVIEMAREN |
| | | QTTQKGQKNSRERMKRIEEGIKELGSQILKEHPVENTQLQNEKLYL |
| | | YYLQNGRDMYVDQELDINRLSDYDVDHIVPQSFLKDDSIDNKVLTR |
| | | SDKNRGKSDNVPSEEVVKKMKNYWRQLLNAKLITQRKFDNLTKAE |
| | | RGGLSELDKAGFIKRQLVETRQITKHVAQILDSRMNTKYDENDKLIR |
| | | EVKVITLKSKLVSDFRKDFQFYKVREINNYHHAHDAYLNAVVGTALI |
| | | KKYPKLESEFVYGDYKVYDVRKMIAKSEQEGADKRTADGSEFESP |
| | | KKKRKV |
| Cas12c1 | 266 | MQTKKTHLHLISAKASRKYRRTIACLSDTAKKDLERRKQSGAADPA |
| polypeptide | | QELSCLKTIKFKLEVPEGSKLPSFDRISQIYNALETIEKGSLSYLLFALI |
| sequence | | LSGFRIFPNSSAAKTFASSSCYKNDQFASQIKEIFGEMVKNFIPSELE |
| | | SILKKGRRKNNKDWTEENIKRVLNSEFGRKNSEGSSALFDSFLSKF |
| | | SQELFRKFDSWNEVNKKYLEAAELLDSMLASYGPFDSVCKMIGDS |
| | | DSRNSLPDKSTIAFTNNAEITVDIESSVMPYMAIAALLREYRQSKSKA |
| | | APVAYVQSHLTTTNGNGLSWFFKFGLDLIRKAPVSSKQSTSDGSKS |
| | | LQELFSVPDDKLDGLKFIKEACEALPEASLLCGEKGELLGYQDFRTS |
| | | FAGHIDSWWANYVNRLFELIELVNQLPESIKLPSILTQKNHNLVASLG |
| | | LQEAEVSHSLELFEGLVKNVRQTLKKLAGIDISSSPNEQDIKEFYAFS |
| | | DVLNRLGSIRNQIENAVQTAKKDKIDLESAIEWKEWKKLKKLPKLNG |
| | | LGGGVPKQQELLDKALESVKQIRHYQRIDFERVIQWAVNEHCLETV |
| | | PKFLVDAEKKKINKESSTDFAAKENAVRFLLEGIGAAARGKTDSVSK |
| | | AAYNWFVVNNFLAKKDLNRYFINCQGCIYKPPYSKRRSLAFALRSD |
| | | NKDTIEVVWEKFETFYKEISKEIEKFNIFSQEFQTFLHLENLRMKLLL |
| | | RRIQKPIPAEIAFFSLPQEYYDSLPPNVAFLALNQEITPSEYITQFNLY |
| | | SSFLNGNLILLRRSRSYLRAKFSWGNSKLIYAAKEARLWKIPNAYW |
| | | KSDEWKMILDSNVLVFDKAGNVLPAPTLKKVCEREGDLRLFYPLLR |
| | | QLPHDWCYRNPFVKSVGREKNVIEVNKEGEPKVASALPGSLFRLIG |
| | | PAPFKSLLDDCFFNPLDKDLRECMLIVDQEISQKVEAQKVEASLESC |
| | | TYSIAVPIRYHLEEPKVSNQFENVLAIDQGEAGLAYAVFSLKSIGEAE |
| | | TKPIAVGTIRIPSIRRLIHSVSTYRKKKQRLQNFKQNYDSTAFIMREN |
| | | VTGDVCAKIVGLMKEFNAFPVLEYDVKNLESGSRQLSAVYKAVNSH |
| | | FLYFKEPGRDALRKQLWYGGDSWTIDGIEIVTRERKEDGKEGVEKI |
| | | VPLKVFPGRSVSARFTSKTCSCCGRNVFDWLFTEKKAKTNKKFNV |
| | | NSKGELTTADGVIQLFEADRSKGPKFYARRKERTPLTKPIAKGSYSL |
| | | EEIERRVRTNLRRAPKSKQSRDTSQSQYFCVYKDCALHFSGMQAD |
| | | ENAAINIGRRFLTALRKNRRSDFPSNVKISDRLLDN |
| Cas12c2 | 267 | MTKHSIPLHAFRNSGADARKWKGRIALLAKRGKETMRTLQFPLEMS |
| polypeptide | | EPEAAAINTTPFAVAYNAIEGTGKGTLFDYWAKLHLAGFRFFPSGG |
| sequence | | AATIFRQQAVFEDASWNAAFCQQSGKDWPWLVPSKLYERFTKAPR |
| | | EVAKKDGSKKSIEFTQENVANESHVSLVGASITDKTPEDQKEFFLK |
| | | MAGALAEKFDSWKSANEDRIVAMKVIDEFLKSEGLHLPSLENIAVKC |
| | | SVETKPDNATVAWHDAPMSGVQNLAIGVFATCASRIDNIYDLNGGK |
| | | LSKLIQESATTPNVTALSWLFGKGLEYFRTTDIDTIMQDFNIPASAKE |
| | | SIKPLVESAQAIPTMTVLGKKNYAPFRPNFGGKIDSWIANYASRLML |
| | | LNDILEQIEPGFELPQALLDNETLMSGIDMTGDELKELIEAVYAWVD |
| | | AAKQGLATLLGRGGNVDDAVQTFEQFSAMMDTLNGTLNTISARYV |
| | | RAVEMAGKDEARLEKLIECKFDIPKWCKSVPKLVGISGGLPKVEEEI |
| | | KVMNAAFKDVRARMFVRFEEIAAYVASKGAGMDVYDALEKRELEQI |
| | | KKLKSAVPERAHIQAYRAVLHRIGRAVQNCSEKTKQLFSSKVIEMG |
| | | VFKNPSHLNNFIFNQKGAIYRSPFDRSRHAPYQLHADKLLKNDWLE |
| | | LLAEISATLMASESTEQMEDALRLERTRLQLQLSGLPDWEYPASLA |
| | | KPDIEVEIQTALKMQLAKDTVTSDVLQRAFNLYSSVLSGLTFKLLRR |
| | | SFSLKMRFSVADTTQLIYVPKVCDWAIPKQYLQAEGEIGIAARVVTE |
| | | SSPAKMVTEVEMKEPKALGHFMQQAPHDWYFDASLGGTQVAGRI |
| | | VEKGKEVGKERKLVGYRMRGNSAYKTVLDKSLVGNTELSQCSMIIE |
| | | IPYTQTVDADFRAQVQAGLPKVSINLPVKETITASNKDEQMLFDRFV |
| | | AIDLGERGLGYAVFDAKTLELQESGHRPIKAITNLLNRTHHYEQRPN |
| | | QRQKFQAKFNVNLSELRENTVGDVCHQINRICAYYNAFPVLEYMVP |
| | | DRLDKQLKSVYESVTNRYIWSSTDAHKSARVQFWLGGETWEHPYL |
| | | KSAKDKKPLVLSPGRGASGKGTSQTCSCCGRNPFDLIKDMKPRAKI |
| | | AVVDGKAKLENSELKLFERNLESKDDMLARRHRNERAGMEQPLTP |
| | | GNYTVDEIKALLRANLRRAPKNRRTKDTTVSEYHCVFSDCGKTMHA |
| | | DENAAVNIGGKFIADIEK |
| OspCas12c | 268 | MTKLRHRQKKLTHDWAGSKKREVLGSNGKLQNPLLMPVKKGQVT |
| polypeptide | | EFRKAFSAYARATKGEMTDGRKNMFTHSFEPFKTKPSLHQCELAD |
| sequence | | KAYQSLHSYLPGSLAHFLLSAHALGFRIFSKSGEATAFQASSKIEAY |
| | | ESKLASELACVDLSIQNLTISTLFNALTTSVRGKGEETSADPLIARFY |
| | | TLLTGKPLSRDTQGPERDLAEVISRKIASSFGTWKEMTANPLQSLQ |
| | | FFEEELHALDANVSLSPAFDVLIKMNDLQGDLKNRTIVFDPDAPVFE |
| | | YNAEDPADIIIKLTARYAKEAVIKNQNVGNYVKNAITTTNANGLGWLL |
| | | NKGLSLLPVSTDDELLEFIGVERSHPSCHALIELIAQLEAPELFEKNV |
| | | FSDTRSEVQGMIDSAVSNHIARLSSSRNSLSMDSEELERLIKSFQIH |
| | | TPHCSLFIGAQSLSQQLESLPEALQSGVNSADILLGSTQYMLTNSLV |
| | | EESIATYQRTLNRINYLSGVAGQINGAIKRKAIDGEKIHLPAAWSELIS |
| | | LPFIGQPVIDVESDLAHLKNQYQTLSNEFDTLISALQKNFDLNFNKAL |
| | | LNRTQHFEAMCRSTKKNALSKPEIVSYRDLLARLTSCLYRGSLVLR |
| | | RAGIEVLKKHKIFESNSELREHVHERKHFVFVSPLDRKAKKLLRLTD |
| | | SRPDLLHVIDEILQHDNLENKDRESLWLVRSGYLLAGLPDQLSSSFI |
| | | NLPIITQKGDRRLIDLIQYDQINRDAFVMLVTSAFKSNLSGLQYRANK |
| | | QSFVVTRTLSPYLGSKLVYVPKDKDWLVPSQMFEGRFADILQSDY |
| | | MVWKDAGRLCVIDTAKHLSNIKKSVFSSEEVLAFLRELPHRTFIQTE |
| | | VRGLGVNVDGIAFNNGDIPSLKTFSNCVQVKVSRTNTSLVQTLNRW |
| | | FEGGKVSPPSIQFERAYYKKDDQIHEDAAKRKIRFQMPATELVHAS |
| | | DDAGWTPSYLLGIDPGEYGMGLSLVSINNGEVLDSGFIHINSLINFA |
| | | SKKSNHQTKVVPRQQYKSPYANYLEQSKDSAAGDIAHILDRLIYKLN |
| | | ALPVFEALSGNSQSAADQVWTKVLSFYTWGDNDAQNSIRKQHWF |
| | | GASHWDIKGMLRQPPTEKKPKPYIAFPGSQVSSYGNSQRCSCCGR |
| | | NPIEQLREMAKDTSIKELKIRNSEIQLFDGTIKLFNPDPSTVIERRRHN |
| | | LGPSRIPVADRTFKNISPSSLEFKELITIVSRSIRHSPEFIAKKRGIGSE |
| | | YFCAYSDCNSSLNSEANAAANVAQKFQKQLFFEL |
| Cas12g1 | 269 | MAQASSTPAVSPRPRPRYREERTLVRKLLPRPGQSKQEFRENVKK |
| polypeptide | | LRKAFLQFNADVSGVCQWAIQFRPRYGKPAEPTETFWKFFLEPET |
| sequence | | SLPPNDSRSPEFRRLQAFEAAAGINGAAALDDPAFTNELRDSILAVA |
| | | SRPKTKEAQRLFSRLKDYQPAHRMILAKVAAEWIESRYRRAHQNW |
| | | ERNYEEWKKEKQEWEQNHPELTPEIREAFNQIFQQLEVKEKRVRIC |
| | | PAARLLQNKDNCQYAGKNKHSVLCNQFNEFKKNHLQGKAIKFFYK |
| | | DAEKYLRCGLQSLKPNVQGPFREDWNKYLRYMNLKEETLRGKNG |
| | | GRLPHCKNLGQECEFNPHTALCKQYQQQLSSRPDLVQHDELYRK |
| | | WRREYWREPRKPVFRYPSVKRHSIAKIFGENYFQADFKNSVVGLR |
| | | LDSMPAGQYLEFAFAPWPRNYRPQPGETEISSVHLHFVGTRPRIGF |
| | | RFRVPHKRSRFDCTQEELDELRSRTFPRKAQDQKFLEAARKRLLET |
| | | FPGNAEQELRLLAVDLGTDSARAAFFIGKTFQQAFPLKIVKIEKLYEQ |
| | | WPNQKQAGDRRDASSKQPRPGLSRDHVGRHLQKMRAQASEIAQK |
| | | RQELTGTPAPETTTDQAAKKATLQPFDLRGLTVHTARMIRDWARLN |
| | | ARQIIQLAEENQVDLIVLESLRGFRPPGYENLDQEKKRRVAFFAHGR |
| | | IRRKVTEKAVERGMRVVTVPYLASSKVCAECRKKQKDNKQWEKNK |
| | | KRGLFKCEGCGSQAQVDENAARVLGRVFWGEIELPTAIP |
| Cas12h1 | 270 | MKVHEIPRSQLLKIKQYEGSFVEWYRDLQEDRKKFASLLFRWAAFG |
| polypeptide | | YAAREDDGATYISPSQALLERRLLLGDAEDVAIKFLDVLFKGGAPSS |
| sequence | | SCYSLFYEDFALRDKAKYSGAKREFIEGLATMPLDKIIERIRQDEQLS |
| | | KIPAEEWLILGAEYSPEEIWEQVAPRIVNVDRSLGKQLRERLGIKCR |
| | | RPHDAGYCKILMEVVARQLRSHNETYHEYLNQTHEMKTKVANNLT |
| | | NEFDLVCEFAEVLEEKNYGLGWYVLWQGVKQALKEQKKPTKIQIAV |
| | | DQLRQPKFAGLLTAKWRALKGAYDTWKLKKRLEKRKAFPYMPNW |
| | | DNDYQIPVGLTGLGVFTLEVKRTEVVVDLKEHGKLFCSHSHYFGDL |
| | | TAEKHPSRYHLKFRHKLKLRKRDSRVEPTIGPWIEAALREITIQKKP |
| | | NGVFYLGLPYALSHGIDNFQIAKRFFSAAKPDKEVINGLPSEMVVGA |
| | | ADLNLSNIVAPVKARIGKGLEGPLHALDYGYGELIDGPKILTPDGPR |
| | | CGELISLKRDIVEIKSAIKEFKACQREGLTMSEETTTWLSEVESPSDS |
| | | PRCMIQSRIADTSRRLNSFKYQMNKEGYQDLAEALRLLDAMDSYN |
| | | SLLESYQRMHLSPGEQSPKEAKFDTKRASFRDLLRRRVAHTIVEYF |
| | | DDCDIVFFEDLDGPSDSDSRNNALVKLLSPRTLLLYIRQALEKRGIG |
| | | MVEVAKDGTSQNNPISGHVGWRNKQNKSEIYFYEDKELLVMDADE |
| | | VGAMNILCRGLNHSVCPYSFVTKAPEKKNDEKKEGDYGKRVKRFL |
| | | KDRYGSSNVRFLVASMGFVTVTTKRPKDALVGKRLYYHGGELVTH |
| | | DLHNRMKDEIKYLVEKEVLARRVSLSDSTIKSYKSFAHV |
| Cas12i1 | 271 | MSNKEKNASETRKAYTTKMIPRSHDRMKLLGNFMDYLMDGTPIFFE |
| polypeptide | | LWNQFGGGIDRDIISGTANKDKISDDLLLAVNWFKVMPINSKPQGVS |
| sequence | | PSNLANLFQQYSGSEPDIQAQEYFASNFDTEKHQWKDMRVEYERL |
| | | LAELQLSRSDMHHDLKLMYKEKCIGLSLSTAHYITSVMFGTGAKNN |
| | | RQTKHQFYSKVIQLLEESTQINSVEQLASIILKAGDCDSYRKLRIRCS |
| | | RKGATPSILKIVQDYELGTNHDDEVNVPSLIANLKEKLGRFEYECEW |
| | | KCMEKIKAFLASKVGPYYLGSYSAMLENALSPIKGMTTKNCKFVLK |
| | | QIDAKNDIKYENEPFGKIVEGFFDSPYFESDTNVKWVLHPHHIGESN |
| | | IKTLWEDLNAIHSKYEEDIASLSEDKKEKRIKVYQGDVCQTINTYCEE |
| | | VGKEAKTPLVQLLRYLYSRKDDIAVDKIIDGITFLSKKHKVEKQKINP |
| | | VIQKYPSFNFGNNSKLLGKIISPKDKLKHNLKCNRNQVDNYIWIEIKV |
| | | LNTKTMRWEKHHYALSSTRFLEEVYYPATSENPPDALAARFRTKTN |
| | | GYEGKPALSAEQIEQIRSAPVGLRKVKKRQMRLEAARQQNLLPRYT |
| | | WGKDFNINICKRGNNFEVTLATKVKKKKEKNYKVVLGYDANIVRKN |
| | | TYAAIEAHANGDGVIDYNDLPVKPIESGFVTVESQVRDKSYDQLSY |
| | | NGVKLLYCKPHVESRRSFLEKYRNGTMKDNRGNNIQIDFMKDFEAI |
| | | ADDETSLYYFNMKYCKLLQSSIRNHSSQAKEYREEIFELLRDGKLSV |
| | | LKLSSLSNLSFVMFKVAKSLIGTYFGHLLKKPKNSKSDVKAPPITDE |
| | | DKQKADPEMFALRLALEEKRLNKVKSKKEVIANKIVAKALELRDKYG |
| | | PVLIKGENISDTTKKGKKSSTNSFLMDWLARGVANKVKEMVMMHQ |
| | | GLEFVEVNPNFTSHQDPFVHKNPENTFRARYSRCTPSELTEKNRK |
| | | EILSFLSDKPSKRPTNAYYNEGAMAFLATYGLKKNDVLGVSLEKFK |
| | | QIMANILHQRSEDQLLFPSRGGMFYLATYKLDADATSVNWNGKQF |
| | | WWCNADLVAAYNVGLVDIQKDFKKK |
| Cas12i2 | 272 | MSSAIKSYKSVLRPNERKNQLLKSTIQCLEDGSAFFFKMLQGLFGGI |
| polypeptide | | TPEIVRFSTEQEKQQQDIALWCAVNWFRPVSQDSLTHTIASDNLVE |
| sequence | | KFEEYYGGTASDAIKQYFSASIGESYYWNDCRQQYYDLCRELGVE |
| | | VSDLTHDLEILCREKCLAVATESNQNNSIISVLFGTGEKEDRSVKLRI |
| | | TKKILEAISNLKEIPKNVAPIQEIILNVAKATKETFRQVYAGNLGAPST |
| | | LEKFIAKDGQKEFDLKKLQTDLKKVIRGKSKERDWCCQEELRSYVE |
| | | QNTIQYDLWAWGEMFNKAHTALKIKSTRNYNFAKQRLEQFKEIQSL |
| | | NNLLVVKKLNDFFDSEFFSGEETYTICVHHLGGKDLSKLYKAWEDD |
| | | PADPENAIVVLCDDLKNNFKKEPIRNILRYIFTIRQECSAQDILAAAKY |
| | | NQQLDRYKSQKANPSVLGNQGFTWTNAVILPEKAQRNDRPNSLDL |
| | | RIWLYLKLRHPDGRWKKHHIPFYDTRFFQEIYAAGNSPVDTCQFRT |
| | | PRFGYHLPKLTDQTAIRVNKKHVKAAKTEARIRLAIQQGTLPVSNLKI |
| | | TEISATINSKGQVRIPVKFDVGRQKGTLQIGDRFCGYDQNQTASHA |
| | | YSLWEVVKEGQYHKELGCFVRFISSGDIVSITENRGNQFDQLSYEG |
| | | LAYPQYADWRKKASKFVSLWQITKKNKKKEIVTVEAKEKFDAICKY |
| | | QPRLYKFNKEYAYLLRDIVRGKSLVELQQIRQEIFRFIEQDCGVTRL |
| | | GSLSLSTLETVKAVKGIIYSYFSTALNASKNNPISDEQRKEFDPELFA |
| | | LLEKLELIRTRKKKQKVERIANSLIQTCLENNIKFIRGEGDLSTTNNAT |
| | | KKKANSRSMDWLARGVFNKIRQLAPMHNITLFGCGSLYTSHQDPL |
| | | VHRNPDKAMKCRWAAIPVKDIGDWLRKLSQNLRAKNIGTGEYYH |
| | | QGVKEFLSHYELQDLEEELLKWRSDRKSNIPCWWLQNRLAEKLGN |
| | | KEAVVYIPVRGGRIYFATHKVATGAVSIVFDQKQVWVCNADHVAAA |
| | | NIALTVKGIGEQSSDEENPDGSRIKLQLTS |
| Linker | 1308 | (GGGS)N |
| Linker | 109 | (GGGGS)N |
| Linker | 1309 | (EAAAK)N |
| Linker | 56 | SGSETPGTSESATPES |
| | 57 | (SGGS)N |
| Linker | 273 | GGSGGS |
| Linker | 1310 | GSSGSETPGTSESATPESSG |
| Linker | 1311 | GGAGGCTCTGGAGGAAGC |
| Linker | 1312 | GGCTCTTCTGGATCTGAAACACCTGGCACAAGCGAGAGCGCCA |
| | | CCCCTGAGAGCTCTGGC |
| AacCas12b | 259 | MAVKSMKVKLRLDNMPEIRAGLWKLHTEVNAGVRYYTEWLSLLRQ |
| polypeptide | | ENLYRRSPNGDGEQECYKTAEECKAELLERLRARQVENGHCGPA |
| sequence | | GSDDELLQLARQLYELLVPQAIGAKGDAQQIARKFLSPLADKDAVG |
| | | GLGIAKAGNKPRWVRMREAGEPGWEEEKAKAEARKSTDRTADVL |
| | | RALADFGLKPLMRVYTDSDMSSVQWKPLRKGQAVRTWDRDMFQ |
| | | QAIERMMSWESWNQRVGEAYAKLVEQKSRFEQKNFVGQEHLVQL |
| | | VNQLQQDMKEASHGLESKEQTAHYLTGRALRGSDKVFEKWEKLD |
| | | PDAPFDLYDTEIKNVQRRNTRRFGSHDLFAKLAEPKYQALWREDA |
| | | SFLTRYAVYNSIVRKLNHAKMFATFTLPDATAHPIWTRFDKLGGNLH |
| | | QYTFLFNEFGEGRHAIRFQKLLTVEDGVAKEVDDVTVPISMSAQLD |
| | | DLLPRDPHELVALYFQDYGAEQHLAGEFGGAKIQYRRDQLNHLHA |
| | | RRGARDVYLNLSVRVQSQSEARGERRPPYAAVFRLVGDNHRAFV |
| | | HFDKLSDYLAEHPDDGKLGSEGLLSGLRVMSVDLGLRTSASISVFR |
| | | VARKDELKPNSEGRVPFCFPIEGNENLVAVHERSQLLKLPGETESK |
| | | DLRAIREERQRTLRQLRTQLAYLRLLVRCGSEDVGRRERSWAKLIE |
| | | QPMDANQMTPDWREAFEDELQKLKSLYGICGDREWTEAVYESVR |
| | | RVWRHMGKQVRDWRKDVRSGERPKIRGYQKDVVGGNSIEQIEYL |
| | | ERQYKFLKSWSFFGKVSGQVIRAEKGSRFAITLREHIDHAKEDRLK |
| | | KLADRIIMEALGYVYALDDERGKGKWVAKYPPCQLILLEELSEYQFN |
| | | NDRPPSENNQLMQWSHRGVFQELLNQAQVHDLLVGTMYAAFSSR |
| | | FDARTGAPGIRCRRVPARCAREQNPEPFPWWLNKFVAEHKLDGC |
| | | PLRADDLIPTGEGEFFVSPFSAEEGDFHQIHADLNAAQNLQRRLWS |
| | | DFDISQIRLRCDWGEVDGEPVLIPRTTGKRTADSYGNKVFYTKTGV |
| | | TYYERERGKKRRKVFAQEELSEEEAELLVEADEAREKSVVLMRDP |
| | | SGIINRGDWTRQKEFWSMVNQRIEGYLVKQIRSRVRLQESACENT |
| | | GDI |
| BhCas12b | 260 | MAPKKKRKVGIHGVPAAATRSFILKIEPNEEVKKGLWKTHEVLNHGI |
| polypeptide | | AYYMNILKLIRQEAIYEHHEQDPKNPKKVSKAEIQAELWDFVLKMQK |
| sequence | | CNSFTHEVDKDEVFNILRELYEELVPSSVEKKGEANQLSNKFLYPLV |
| | | DPNSQSGKGTASSGRKPRWYNLKIAGDPSWEEEKKKWEEDKKKD |
| | | PLAKILGKLAEYGLIPLFIPYTDSNEPIVKEIKWMEKSRNQSVRRLDK |
| | | DMFIQALERFLSWESWNLKVKEEYEKVEKEYKTLEERIKEDIQALKA |
| | | LEQYEKERQEQLLRDTLNTNEYRLSKRGLRGWREIIQKWLKMDEN |
| | | EPSEKYLEVFKDYQRKHPREAGDYSVYEFLSKKENHFIWRNHPEY |
| | | PYLYATFCEIDKKKKDAKQQATFTLADPINHPLWRFEERSGSNLN |
| | | KYRILTEQLHTEKLKKKLTVQLDRLIYPTESGGWEEKGKVDIVLLPS |
| | | RQFYNQIFLDIEEKGKHAFTYKDESIKFPLKGTLGGARVQFDRDHLR |
| | | RYPHKVESGNVGRIYFNMTVNIEPTESPVSKSLKIHRDDFPKVVNFK |
| | | PKELTEWIKDSKGKKLKSGIESLEIGLRVMSIDLGQRQAAAASIFEVV |
| | | DQKPDIEGKLFFPIKGTELYAVHRASFNIKLPGETLVKSREVLRKAR |
| | | EDNLKLMNQKLNFLRNVLHFQQFEDITEREKRVTKWISRQENSDVP |
| | | LVYQDELIQIRELMYKPYKDWAFLKQLHKRLEVEIGKEVKHWRKS |
| | | LSDGRKGLYGISLKNIDEIDRTRKFLLRWSLRPTEPGEVRRLEPGQR |
| | | FAIDQLNHLNALKEDRLKKMANTIIMHALGYCYDVRKKKWQAKNPA |
| | | CQIILFEDLSNYNPYEERSRFENSKLMKWSRREIPRQVALQGEIYGL |
| | | QVGEVGAQFSSRFHAKTGSPGIRCSVVTKEKLQDNRFFKNLQREG |
| | | RLTLDKIAVLKEGDLYPDKGGEKFISLSKDRKCVTTHADINAAQNLQ |
| | | KRFWTRTHGFYKVYCKAYQVDGQTVYIPESKDQKQKIIEEFGEGYF |
| | | ILKDGVYEWNAGKLKIKKGSSKQSSSELVDSDILKDSFDLASELKG |
| | | EKLMLYRDPSGNVFPSDKWMAAGVFFGKLERILISKLTNQYSISTIE |
| | | DDSSKQSMKRPAATKKAGQAKKKK |
| BvCas12b | 264 | MAIRSIKLKMKTNSGTDSIYLRKALWRTHQLINEGIAYYMNLLTLYRQ |
| (Bacillus | | IIPSSIGESGDANQLGNKFLYPLVDPNSQSGKGTSNAGRKPRWKRL |
| sp. V3-13) | | KEEGNPDWELEKKKDEERKAKDPTVKIFDNLNKYGLLPLFPLFTNIQ |
| polynucleotide | | KDIEWLPLGKRQSVRKWDKDMFIQAIERLLSWESWNRRVADEYKQ |
| sequence | | LKEKTESYYKEHLTGGEEWIEKIRKFEKERNMELEKNAFAPNDGYFI |
| | | TSRQIRGWDRVYEKWSKLPESASPEELWKVVAEQQNKMSEGFGD |
| | | PKVFSFLANRENRDIWRGHSERIYHIAAYNGLQKKLSRTKEQATFTL |
| | | PDAIEHPLWIRYESPGGTNLNLFKLEEKQKKNYYVTLSKIIWPSEEK |
| | | WIEKENIEIPLAPSIQFNRQIKLKQHVKGKQEISFSDYSSRISLDGVLG |
| | | GSRIQFNRKYIKNHKELLGEGDIGPVFFNLVVDVAPLQETRNGRLQ |
| | | SPIGKALKVISSDFSKVIDYKPKELMDWMNTGSASNSFGVASLLEG |
| | | MRVMSIDMGQRTSASVSIFEVVKELPKDQEQKLFYSINDTELFAIHK |
| | | RSFLLNLPGEVVTKNNKQQRQERRKKRQFVRSQIRMLANVLRLET |
| | | KKTPDERKKAIHKLMEIVQSYDSWTASQKEVWEKELNLLTNMAAFN |
| | | DEIWKESLVELHHRIEPYVGQIVSKWRKGLSEGRKNLAGISMWNID |
| | | ELEDTRRLLISWSKRSRTPGEANRIETDEPFGSSLLQHIQNVKDDRL |
| | | KQMANLIIMTALGFKYDKEEKDRYKRWKETYPACQIILFENLNRYLF |
| | | NLDRSRRENSRLMKWAHRSIPRTVSMQGEMFGLQVGDVRSEYSS |
| | | RFHAKTGAPGIRCHALTEEDLKAGSNTLKRLIEDGFINESELAYLKK |
| | | GDIIPSQGGELFVTLSKRYKKDSDNNELTVIHADINAAQNLQKRFWQ |
| | | QNSEVYRVPCQLARMGEDKLYIPKSQTETIKKYFGKGSFVKNNTEQ |
| | | EVYKWEKSEKMKIKTDTTFDLQDLDGFEDISKTIELAQEQQKKYLTM |
| | | FRDPSGYFFNNETWRPQKEYWSIVNNIIKSCLKKKILSNKVEL |
| BTCas12b. | 265 | MATRSFILKIEPNEEVKKGLWKTHEVLNHGIAYYMNILKLIRQEAIYE |
| BTCas12b | | EAIGDKTKEAYQAELINIIRNQQRNNGSSEEHGSDQEILALLRQLYEL |
| polypeptide | | HHEQDPKNPKKVSKAEIQAELWDFVLKMQKCNSFTHEVDKDVVFNI |
| sequence | | LRELYEELVPSSVEKKGEANQLSNKFLYPLVDPNSQSGKGTASSG |
| | | RKPRWYNLKIAGDPSWEEEKKKWEEDKKKDPLAKILGKLAEYGLIP |
| | | LFIPFTDSNEPIVKEIKWMEKSRNQSVRRLDKDMFIQALERFLSWES |
| | | WNLKVKEEYEKVEKEHKTLEERIKEDIQAFKSLEQYEKERQEQLLR |
| | | DTLNTNEYRLSKRGLRGWREIIQKWLKMDENEPSEKYLEVFKDYQ |
| | | RKHPREAGDYSVYEFLSKKENHFIWRNHPEYPYLYATFCEIDKKKK |
| | | DAKQQATFTLADPINHPLWRFEERSGSNLNKYRILTEQLHTEKLKK |
| | | KLTVQLDRLIYPTESGGWEEKGKVDIVLLPSRQFYNQIFLDIEEKGK |
| | | HAFTYKDESIKFPLKGTLGGARVQFDRDHLRRYPHKVESGNVGRIY |
| | | FNMTVNIEPTESPVSKSLKIHRDDFPKFVNFKPKELTEWIKDSKGKK |
| | | LKSGIESLEIGLRVMSIDLGQRQAAAASIFEVVDQKPDIEGKLFFPIK |
| | | GTELYAVHRASFNIKLPGETLVKSREVLRKAREDNLKLMNQKLNFL |
| | | RNVLHFQQFEDITEREKRVTKWISRQENSDVPLVYQDELIQIRELMY |
| | | KPYKDWAFLKQLHKRLEVEIGKEVKHWRKSLSDGRKGLYGISLKN |
| | | IDEIDRTRKFLLRWSLRPTEPGEVRRLEPGQRFAIDQLNHLNALKED |
| | | RLKKMANTIIMHALGYCYDVRKKKWQAKNPACQIILFEDLSNYNPYE |
| | | ERSRFENSKLMKWSRREIPRQVALQGEIYGLQVGEVGAQFSSRFH |
| | | AKTGSPGIRCSVVTKEKLQDNRFFKNLQREGRLTLDKIAVLKEGDLY |
| | | PDKGGEKFISLSKDRKLVTTHADINAAQNLQKRFWTRTHGFYKVYC |
| | | KAYQVDGQTVYIPESKDQKQKIIEEFGEGYFILKDGVYEWGNAGKL |
| | | KIKKGSSKQSSSELVDSDILKDSFDLASELKGEKLMLYRDPSGNVFP |
| | | SDKWMAAGVFFGKLERILISKLTNQYSISTIEDDSSKQSM |
| 5′UTR | 261 | GGGAAATAAGAGAGAAAAGAAGAGTAAGAAGAAATATAAGAGCC |
| | | ACC |
| 3′UTR (TriLink | 262 | GCTGGAGCCTCGGTGGCCATGCTTCTTGCCCCTTGGGCCTCCC |
| standard UTR) | | CCCAGCCCCTCCTCCCCTTCCTGCACCCGTACCCCCGTGGTCTT |
| | | TGAATAAAGTCTGA |
| bhCas12b (V4) | 263 | ATGGCCCCAAAGAAGAAGCGGAAGGTCGGTATCCACGGAGTCC |
| polynucleotide | | CAGCAGCCGCCACCAGATCCTTCATCCTGAAGATCGAGCCCAA |
| sequence | | CGAGGAAGTGAAGAAAGGCCTCTGGAAAACCCACGAGGTGCTG |
| | | AACCACGGAATCGCCTACTACATGAATATCCTGAAGCTGATCCG |
| | | GCAAGAGGCCATCTACGAGCACCACGAGCAGGACCCCAAGAAT |
| | | CCCAAGAAGGTGTCCAAGGCCGAGATCCAGGCCGAGCTGTGGG |
| | | ATTTCGTGCTGAAGATGCAGAAGTGCAACAGCTTCACACACGAG |
| | | GTGGACAAGGACGAGGTGTTCAACATCCTGAGAGAGCTGTACG |
| | | AGGAACTGGTGCCCAGCAGCGTGGAAAAGAAGGGCGAAGCCAA |
| | | CCAGCTGAGCAACAAGTTTCTGTACCCTCTGGTGGACCCCAACA |
| | | GCCAGTCTGGAAAGGGAACAGCCAGCAGCGGCAGAAAGCCCA |
| | | GATGGTACAACCTGAAGATTGCCGGCGATCCCTCCTGGGAAGA |
| | | AGAGAAGAAGAAGTGGGAAGAAGATAAGAAAAAGGACCCGCTG |
| | | GCCAAGATCCTGGGCAAGCTGGCTGAGTACGGACTGATCCCTC |
| | | TGTTCATCCCCTACACCGACAGCAACGAGCCCATCGTGAAAGAA |
| | | ATCAAGTGGATGGAAAAGTCCCGGAACCAGAGCGTGCGGCGGC |
| | | TGGATAAGGACATGTTCATTCAGGCCCTGGAACGGTTCCTGAGC |
| | | TGGGAGAGCTGGAACCTGAAAGTGAAAGAGGAATACGAGAAGG |
| | | TCGAGAAAGAGTACAAGACCCTGGAAGAGAGGATCAAAGAGGA |
| | | CATCCAGGCTCTGAAGGCTCTGGAACAGTATGAGAAAGAGCGG |
| | | CAAGAACAGCTGCTGCGGGACACCCTGAACACCAACGAGTACC |
| | | GGCTGAGCAAGAGAGGCCTTAGAGGCTGGCGGGAAATCATCCA |
| | | GAAATGGCTGAAAATGGACGAGAACGAGCCCTCCGAGAAGTAC |
| | | CTGGAAGTGTTCAAGGACTACCAGCGGAAGCACCCTAGAGAGG |
| | | CCGGCGATTACAGCGTGTACGAGTTCCTGTCCAAGAAAGAGAAC |
| | | CACTTCATCTGGCGGAATCACCCTGAGTACCCCTACCTGTACGC |
| | | CACCTTCTGCGAGATCGACAAGAAAAAGAAGGACGCCAAGCAG |
| | | CAGGCCACCTTCACACTGGCCGATCCTATCAATCACCCTCTGTG |
| | | GGTCCGATTCGAGGAAAGAAGCGGCAGCAACCTGAACAAGTAC |
| | | AGAATCCTGACCGAGCAGCTGCACACCGAGAAGCTGAAGAAAA |
| | | AGCTGACAGTGCAGCTGGACCGGCTGATCTACCCTACAGAATCT |
| | | GGCGGCTGGGAAGAGAAGGGCAAAGTGGACATTGTGCTGCTGC |
| | | CCAGCCGGCAGTTCTACAACCAGATCTTCCTGGACATCGAGGAA |
| | | AAGGGCAAGCACGCCTTCACCTACAAGGATGAGAGCATCAAGTT |
| | | CCCTCTGAAGGGCACACTCGGCGGAGCCAGAGTGCAGTTCGAC |
| | | AGAGATCACCTGAGAAGATACCCTCACAAGGTGGAAAGCGGCA |
| | | ACGTGGGCAGAATCTACTTCAACATGACCGTGAACATCGAGCCT |
| | | ACAGAGTCCCCAGTGTCCAAGTCTCTGAAGATCCACCGGGACG |
| | | ACTTCCCCAAGGTGGTCAACTTCAAGCCCAAAGAACTGACCGAG |
| | | TGGATCAAGGACAGCAAGGGCAAGAAACTGAAGTCCGGCATCG |
| | | AGTCCCTGGAAATCGGCCTGAGAGTGATGAGCATCGACCTGGG |
| | | ACAGAGACAGGCCGCTGCCGCCTCTATTTTCGAGGTGGTGGAT |
| | | CAGAAGCCCGACATCGAAGGCAAGCTGTTTTTCCCAATCAAGGG |
| | | CACCGAGCTGTATGCCGTGCACAGAGCCAGCTTCAACATCAAG |
| | | CTGCCCGGCGAGACACTGGTCAAGAGCAGAGAAGTGCTGCGGA |
| | | AGGCCAGAGAGGACAATCTGAAACTGATGAACCAGAAGCTCAAC |
| | | TTCCTGCGGAACGTGCTGCACTTCCAGCAGTTCGAGGACATCAC |
| | | CGAGAGAGAGAAGCGGGTCACCAAGTGGATCAGCAGACAAGAG |
| | | AACAGCGACGTGCCCCTGGTGTACCAGGATGAGCTGATCCAGA |
| | | TCCGCGAGCTGATGTACAAGCCTTACAAGGACTGGGTCGCCTTC |
| | | CTGAAGCAGCTCCACAAGAGACTGGAAGTCGAGATCGGCAAAG |
| | | AAGTGAAGCACTGGCGGAAGTCCCTGAGCGACGGAAGAAAGGG |
| | | CCTGTACGGCATCTCCCTGAAGAACATCGACGAGATCGATCGGA |
| | | CCCGGAAGTTCCTGCTGAGATGGTCCCTGAGGCCTACCGAACC |
| | | TGGCGAAGTGCGTAGACTGGAACCCGGCCAGAGATTCGCCATC |
| | | GACCAGCTGAATCACCTGAACGCCCTGAAAGAAGATCGGCTGA |
| | | AGAAGATGGCCAACACCATCATCATGCACGCCCTGGGCTACTG |
| | | CTACGACGTGCGGAAGAAGAAATGGCAGGCTAAGAACCCCGCC |
| | | TGCCAGATCATCCTGTTCGAGGATCTGAGCAACTACAACCCCTA |
| | | CGAGGAAAGGTCCCGCTTCGAGAACAGCAAGCTCATGAAGTGG |
| | | TCCAGACGCGAGATCCCCAGACAGGTTGCACTGCAGGGCGAGA |
| | | TCTATGGCCTGCAAGTGGGAGAAGTGGGCGCTCAGTTCAGCAG |
| | | CAGATTCCACGCCAAGACAGGCAGCCCTGGCATCAGATGTAGC |
| | | GTCGTGACCAAAGAGAAGCTGCAGGACAATCGGTTCTTCAAGAA |
| | | TCTGCAGAGAGAGGGCAGACTGACCCTGGACAAAATCGCCGTG |
| | | CTGAAAGAGGGCGATCTGTACCCAGACAAAGGCGGCGAGAAGT |
| | | TCATCAGCCTGAGCAAGGATCGGAAGTGCGTGACCACACACGC |
| | | CGACATCAACGCCGCTCAGAACCTGCAGAAGCGGTTCTGGACA |
| | | AGAACCCACGGCTTCTACAAGGTGTACTGCAAGGCCTACCAGGT |
| | | GGACGGCCAGACCGTGTACATCCCTGAGAGCAAGGACCAGAAG |
| | | CAGAAGATCATCGAAGAGTTCGGCGAGGGCTACTTCATTCTGAA |
| | | GGACGGGGTGTACGAATGGGTCAACGCCGGCAAGCTGAAAATC |
| | | AAGAAGGGCAGCTCCAAGCAGAGCAGCAGCGAGCTGGTGGATA |
| | | GCGACATCCTGAAAGACAGCTTCGACCTGGCCTCCGAGCTGAA |
| | | AGGCGAAAAGCTGATGCTGTACAGGGACCCCAGCGGCAATGTG |
| | | TTCCCCAGCGACAAATGGATGGCCGCTGGCGTGTTCTTCGGAA |
| | | AGCTGGAACGCATCCTGATCAGCAAGCTGACCAACCAGTACTCC |
| | | ATCAGCACCATCGAGGACGACAGCAGCAAGCAGTCTATGAAAA |
| | | GGCCGGCGGCCACGAAAAAGGCCGGCCAGGCAAAAAAGAAAAA |
| | | G |
| NLS | 1313 | MAPKKKRKVGIHGVPAA |
| NLS | 1314 | ATGGCCCCAAAGAAGAAGCGGAAGGTCGGTATCCACGGAGTCC |
| | | CAGCAGCC |
| 101 Cas9 TadAins | 1315 | MDKKYSIGLAIGTNSVGWAVITDEYKVPSKKFKVLGNTDRHSIKKNLI |
| 1015 polypeptide | | GALLFDSGETAEATRLKRTARRRYTRRKNRICYLQEIFSNEMAKVD |
| sequence | | DSFFHRLEESFLVEEDKKHERHPIFGNIVDEVAYHEKYPTIYHLRKK |
| | | LVDSTDKADLRLIYLALAHMIKFRGHFLIEGDLNPDNSDVDKLFIQLV |
| | | QTYNQLFEENPINASGVDAKAILSARLSKSRRLENLIAQLPGEKKNG |
| | | LFGNLIALSLGLTPNFKSNFDLAEDAKLQLSKDTYDDDLDNLLAQIG |
| | | DQYADLFLAAKNLSDAILLSDILRVNTEITKAPLSASMIKRYDEHHQD |
| | | LTLLKALVRQQLPEKYKEIFFDQSKNGYAGYIDGGASQEEFYKFIKPI |
| | | LEKMDGTEELLVKLNREDLLRKQRTFDNGSIPHQIHLGELHAILRRQ |
| | | EDFYPFLKDNREKIEKILTFRIPYYVGPLARGNSRFAWMTRKSEETIT |
| | | PWNFEEVVDKGASAQSFIERMTNFDKNLPNEKVLPKHSLLYEYFTV |
| | | YNELTKVKYVTEGMRKPAFLSGEQKKAIVDLLFKTNRKVTVKQLKE |
| | | DYFKKIECFDSVEISGVEDRFNASLGTYHDLLKIIKDKDFLDNEENED |
| | | ILEDIVLTLTLFEDREMIEERLKTYAHLFDDKVMKQLKRRRYTGWGR |
| | | LSRKLINGIRDKQSGKTILDFLKSDGFANRNFMQLIHDDSLTFKEDIQ |
| | | KAQVSGQGDSLHEHIANLAGSPAIKKGILQTVKVVDELVKVMGRHK |
| | | PENIVIEMARENQTTQKGQKNSRERMKRIEEGIKELGSQILKEHPVE |
| | | NTQLQNEKLYLYYLQNGRDMYVDQELDINRLSDYDVDHIVPQSFLK |
| | | DDSIDNKVLTRSDKNRGKSDNVPSEEVVKKMKNYWRQLLNAKLITQ |
| | | RKFDNLTKAERGGLSELDKAGFIKRQLVETRQITKHVAQILDSRMNT |
| | | KYDENDKLIREVKVITLKSKLVSDFRKDFQFYKVREINNYHHAHDAY |
| | | LNAVVGTALIKKYPKLESEFVYGDYKVGSSGSETPGTSESATPESS |
| | | GSEVEFSHEYWMRHALTLAKRARDEREVPVGAVLVLNNRVIGEGW |
| | | NRAIGLHDPTAHAEIMALRQGGLVMQNYRLIDATLYVTFEPCVMCA |
| | | GAMIHSRIGRVVFGVRNAKTGAAGSLMDVLHYPGMNHRVEITEGIL |
| | | ADECAALLCYFFRMPRQVFNAQKKAQSSTDYDVRKMIAKSEQEIGK |
| | | ATAKYFFYSNIMNFFKTEITLANGEIRKRPLIETNGETGEIVWDKGRD |
| | | FATVRKVLSMPQVNIVKKTEVQTGGFSKESILPKRNSDKLIARKKDW |
| | | DPKKYGGFDSPTVAYSVLVVAKVEKGKSKKLKSVKELLGITIMERSS |
| | | FEKNPIDFLEAKGYKEVKKDLIIKLPKYSLFELENGRKRMLASAGELQ |
| | | KGNELALPSKYVNFLYLASHYEKLKGSPEDNEQKQLFVEQHKHYLD |
| | | EIIEQISEFSKRVILADANLDKVLSAYNKHRDKPIREQAENIIHLFTLTN |
| | | LGAPAAFKYFDTTIDRKRYTSTKEVLDATLIHQSITGLYETRIDLSQL |
| | | GGD |
| 102 Cas9 TadAins | 1316 | MDKKYSIGLAIGTNSVGWAVITDEYKVPSKKFKVLGNTDRHSIKKNLI |
| 1022 polypeptide | | DSFFHRLEESFLVEEDKKHERHPIFGNIVDEVAYHEKYPTIYHLRKK |
| sequence | | GALLFDSGETAEATRLKRTARRRYTRRKNRICYLQEIFSNEMAKVD |
| | | LVDSTDKADLRLIYLALAHMIKFRGHFLIEGDLNPDNSDVDKLFIQLV |
| | | QTYNQLFEENPINASGVDAKAILSARLSKSRRLENLIAQLPGEKKNG |
| | | LFGNLIALSLGLTPNFKSNFDLAEDAKLQLSKDTYDDDLDNLLAQIG |
| | | DQYADLFLAAKNLSDAILLSDILRVNTEITKAPLSASMIKRYDEHHQD |
| | | LTLLKALVRQQLPEKYKEIFFDQSKNGYAGYIDGGASQEEFYKFIKPI |
| | | LEKMDGTEELLVKLNREDLLRKQRTFDNGSIPHQIHLGELHAILRRQ |
| | | EDFYPFLKDNREKIEKILTFRIPYYVGPLARGNSRFAWMTRKSEETIT |
| | | PWNFEEVVDKGASAQSFIERMTNFDKNLPNEKVLPKHSLLYEYFTV |
| | | YNELTKVKYVTEGMRKPAFLSGEQKKAIVDLLFKTNRKVTVKQLKE |
| | | DYFKKIECFDSVEISGVEDRFNASLGTYHDLLKIIKDKDFLDNEENED |
| | | ILEDIVLTLTLFEDREMIEERLKTYAHLFDDKVMKQLKRRRYTGWGR |
| | | LSRKLINGIRDKQSGKTILDFLKSDGFANRNFMQLIHDDSLTFKEDIQ |
| | | KAQVSGQGDSLHEHIANLAGSPAIKKGILQTVKVVDELVKVMGRHK |
| | | PENIVIEMARENQTTQKGQKNSRERMKRIEEGIKELGSQILKEHPVE |
| | | NTQLQNEKLYLYYLQNGRDMYVDQELDINRLSDYDVDHIVPQSFLK |
| | | DDSIDNKVLTRSDKNRGKSDNVPSEEVVKKMKNYWRQLLNAKLITQ |
| | | RKFDNLTKAERGGLSELDKAGFIKRQLVETRQITKHVAQILDSRMNT |
| | | KYDENDKLIREVKVITLKSKLVSDFRKDFQFYKVREINNYHHAHDAY |
| | | LNAVVGTALIKKYPKLESEFVYGDYKVYDVRKMIGSSGSETPGTSE |
| | | SATPESSGSEVEFSHEYWMRHALTLAKRARDEREVPVGAVLVLNN |
| | | RVIGEGWNRAIGLHDPTAHAEIMALRQGGLVMQNYRLIDATLYVTF |
| | | EPCVMCAGAMIHSRIGRVVFGVRNAKTGAAGSLMDVLHYPGMNH |
| | | RVEITEGILADECAALLCYFFRMPRQVFNAQKKAQSSTDAKSEQEIG |
| | | KATAKYFFYSNIMNFFKTEITLANGEIRKRPLIETNGETGEIVWDKGR |
| | | DFATVRKVLSMPQVNIVKKTEVQTGGFSKESILPKRNSDKLIARKKD |
| | | WDPKKYGGFDSPTVAYSVLVVAKVEKGKSKKLKSVKELLGITIMER |
| | | SSFEKNPIDFLEAKGYKEVKKDLIIKLPKYSLFELENGRKRMLASAGE |
| | | LQKGNELALPSKYVNFLYLASHYEKLKGSPEDNEQKQLFVEQHKHY |
| | | LDEIIEQISEFSKRVILADANLDKVLSAYNKHRDKPIREQAENIIHLFTL |
| | | TNLGAPAAFKYFDTTIDRKRYTSTKEVLDATLIHQSITGLYETRIDLS |
| | | QLGGD |
| 103 Cas9 TadAins | 1317 | MDKKYSIGLAIGTNSVGWAVITDEYKVPSKKFKVLGNTDRHSIKKNLI |
| 1029 polypeptide | | GALLFDSGETAEATRLKRTARRRYTRRKNRICYLQEIFSNEMAKVD |
| sequence | | DSFFHRLEESFLVEEDKKHERHPIFGNIVDEVAYHEKYPTIYHLRKK |
| | | LVDSTDKADLRLIYLALAHMIKFRGHFLIEGDLNPDNSDVDKLFIQLV |
| | | QTYNQLFEENPINASGVDAKAILSARLSKSRRLENLIAQLPGEKKNG |
| | | LFGNLIALSLGLTPNFKSNFDLAEDAKLQLSKDTYDDDLDNLLAQIG |
| | | DQYADLFLAAKNLSDAILLSDILRVNTEITKAPLSASMIKRYDEHHQD |
| | | LTLLKALVRQQLPEKYKEIFFDQSKNGYAGYIDGGASQEEFYKFIKPI |
| | | LEKMDGTEELLVKLNREDLLRKQRTFDNGSIPHQIHLGELHAILRRQ |
| | | EDFYPFLKDNREKIEKILTFRIPYYVGPLARGNSRFAWMTRKSEETIT |
| | | PWNFEEVVDKGASAQSFIERMTNFDKNLPNEKVLPKHSLLYEYFTV |
| | | YNELTKVKYVTEGMRKPAFLSGEQKKAIVDLLFKTNRKVTVKQLKE |
| | | DYFKKIECFDSVEISGVEDRFNASLGTYHDLLKIIKDKDFLDNEENED |
| | | ILEDIVLTLTLFEDREMIEERLKTYAHLFDDKVMKQLKRRRYTGWGR |
| | | LSRKLINGIRDKQSGKTILDFLKSDGFANRNFMQLIHDDSLTFKEDIQ |
| | | KAQVSGQGDSLHEHIANLAGSPAIKKGILQTVKVVDELVKVMGRHK |
| | | PENIVIEMARENQTTQKGQKNSRERMKRIEEGIKELGSQILKEHPVE |
| | | NTQLQNEKLYLYYLQNGRDMYVDQELDINRLSDYDVDHIVPQSFLK |
| | | DDSIDNKVLTRSDKNRGKSDNVPSEEVVKKMKNYWRQLLNAKLITQ |
| | | RKFDNLTKAERGGLSELDKAGFIKRQLVETRQITKHVAQILDSRMNT |
| | | KYDENDKLIREVKVITLKSKLVSDFRKDFQFYKVREINNYHHAHDAY |
| | | LNAVVGTALIKKYPKLESEFVYGDYKVYDVRKMIAKSEQEIGSSGSE |
| | | TPGTSESATPESSGSEVEFSHEYWMRHALTLAKRARDEREVPVGA |
| | | VLVLNNRVIGEGWNRAIGLHDPTAHAEIMALRQGGLVMQNYRLIDA |
| | | TLYVTFEPCVMCAGAMIHSRIGRVVFGVRNAKTGAAGSLMDVLHYP |
| | | GMNHRVEITEGILADECAALLCYFFRMPRQVFNAQKKAQSSTDGKA |
| | | TAKYFFYSNIMNFFKTEITLANGEIRKRPLIETNGETGEIVWDKGRDF |
| | | ATVRKVLSMPQVNIVKKTEVQTGGFSKESILPKRNSDKLIARKKDW |
| | | DPKKYGGFDSPTVAYSVLVVAKVEKGKSKKLKSVKELLGITIMERSS |
| | | FEKNPIDFLEAKGYKEVKKDLIIKLPKYSLFELENGRKRMLASAGELQ |
| | | KGNELALPSKYVNFLYLASHYEKLKGSPEDNEQKQLFVEQHKHYLD |
| | | EIIEQISEFSKRVILADANLDKVLSAYNKHRDKPIREQAENIIHLFTLTN |
| | | LGAPAAFKYFDTTIDRKRYTSTKEVLDATLIHQSITGLYETRIDLSQL |
| | | GGD |
| 103 Cas9 TadAins | 1318 | MDKKYSIGLAIGTNSVGWAVITDEYKVPSKKFKVLGNTDRHSIKKNLI |
| 1040 polypeptide | | GALLFDSGETAEATRLKRTARRRYTRRKNRICYLQEIFSNEMAKVD |
| sequence | | DSFFHRLEESFLVEEDKKHERHPIFGNIVDEVAYHEKYPTIYHLRKK |
| | | LVDSTDKADLRLIYLALAHMIKFRGHFLIEGDLNPDNSDVDKLFIQLV |
| | | QTYNQLFEENPINASGVDAKAILSARLSKSRRLENLIAQLPGEKKNG |
| | | LFGNLIALSLGLTPNFKSNFDLAEDAKLQLSKDTYDDDLDNLLAQIG |
| | | DQYADLFLAAKNLSDAILLSDILRVNTEITKAPLSASMIKRYDEHHQD |
| | | LTLLKALVRQQLPEKYKEIFFDQSKNGYAGYIDGGASQEEFYKFIKPI |
| | | LEKMDGTEELLVKLNREDLLRKQRTFDNGSIPHQIHLGELHAILRRQ |
| | | EDFYPFLKDNREKIEKILTFRIPYYVGPLARGNSRFAWMTRKSEETIT |
| | | PWNFEEVVDKGASAQSFIERMTNFDKNLPNEKVLPKHSLLYEYFTV |
| | | YNELTKVKYVTEGMRKPAFLSGEQKKAIVDLLFKTNRKVTVKQLKE |
| | | DYFKKIECFDSVEISGVEDRFNASLGTYHDLLKIIKDKDFLDNEENED |
| | | ILEDIVLTLTLFEDREMIEERLKTYAHLFDDKVMKQLKRRRYTGWGR |
| | | LSRKLINGIRDKQSGKTILDFLKSDGFANRNFMQLIHDDSLTFKEDIQ |
| | | KAQVSGQGDSLHEHIANLAGSPAIKKGILQTVKVVDELVKVMGRHK |
| | | PENIVIEMARENQTTQKGQKNSRERMKRIEEGIKELGSQILKEHPVE |
| | | NTQLQNEKLYLYYLQNGRDMYVDQELDINRLSDYDVDHIVPQSFLK |
| | | DDSIDNKVLTRSDKNRGKSDNVPSEEVVKKMKNYWRQLLNAKLITQ |
| | | RKFDNLTKAERGGLSELDKAGFIKRQLVETRQITKHVAQILDSRMNT |
| | | KYDENDKLIREVKVITLKSKLVSDFRKDFQFYKVREINNYHHAHDAY |
| | | LNAVVGTALIKKYPKLESEFVYGDYKVYDVRKMIAKSEQEIGKATAK |
| | | YFFYSGSSGSETPGTSESATPESSGSEVEFSHEYWMRHALTLAKR |
| | | ARDEREVPVGAVLVLNNRVIGEGWNRAIGLHDPTAHAEIMALRQG |
| | | GLVMQNYRLIDATLYVTFEPCVMCAGAMIHSRIGRVVFGVRNAKTG |
| | | AAGSLMDVLHYPGMNHRVEITEGILADECAALLCYFFRMPRQVFNA |
| | | QKKAQSSTDNIMNFFKTEITLANGEIRKRPLIETNGETGEIVWDKGR |
| | | DFATVRKVLSMPQVNIVKKTEVQTGGFSKESILPKRNSDKLIARKKD |
| | | WDPKKYGGFDSPTVAYSVLVVAKVEKGKSKKLKSVKELLGITIMER |
| | | SSFEKNPIDFLEAKGYKEVKKDLIIKLPKYSLFELENGRKRMLASAGE |
| | | LQKGNELALPSKYVNFLYLASHYEKLKGSPEDNEQKQLFVEQHKHY |
| | | LDEIIEQISEFSKRVILADANLDKVLSAYNKHRDKPIREQAENIIHLFTL |
| | | TNLGAPAAFKYFDTTIDRKRYTSTKEVLDATLIHQSITGLYETRIDLS |
| | | QLGGD |
| 105 Cas9 TadAins | 1319 | MDKKYSIGLAIGTNSVGWAVITDEYKVPSKKFKVLGNTDRHSIKKNLI |
| 1068 polypeptide | | GALLFDSGETAEATRLKRTARRRYTRRKNRICYLQEIFSNEMAKVD |
| sequence | | DSFFHRLEESFLVEEDKKHERHPIFGNIVDEVAYHEKYPTIYHLRKK |
| | | LVDSTDKADLRLIYLALAHMIKFRGHFLIEGDLNPDNSDVDKLFIQLV |
| | | QTYNQLFEENPINASGVDAKAILSARLSKSRRLENLIAQLPGEKKNG |
| | | LFGNLIALSLGLTPNFKSNFDLAEDAKLQLSKDTYDDDLDNLLAQIG |
| | | DQYADLFLAAKNLSDAILLSDILRVNTEITKAPLSASMIKRYDEHHQD |
| | | LTLLKALVRQQLPEKYKEIFFDQSKNGYAGYIDGGASQEEFYKFIKPI |
| | | LEKMDGTEELLVKLNREDLLRKQRTFDNGSIPHQIHLGELHAILRRQ |
| | | EDFYPFLKDNREKIEKILTFRIPYYVGPLARGNSRFAWMTRKSEETIT |
| | | PWNFEEVVDKGASAQSFIERMTNFDKNLPNEKVLPKHSLLYEYFTV |
| | | YNELTKVKYVTEGMRKPAFLSGEQKKAIVDLLFKTNRKVTVKQLKE |
| | | DYFKKIECFDSVEISGVEDRFNASLGTYHDLLKIIKDKDFLDNEENED |
| | | ILEDIVLTLTLFEDREMIEERLKTYAHLFDDKVMKQLKRRRYTGWGR |
| | | LSRKLINGIRDKQSGKTILDFLKSDGFANRNFMQLIHDDSLTFKEDIQ |
| | | KAQVSGQGDSLHEHIANLAGSPAIKKGILQTVKVVDELVKVMGRHK |
| | | PENIVIEMARENQTTQKGQKNSRERMKRIEEGIKELGSQILKEHPVE |
| | | NTQLQNEKLYLYYLQNGRDMYVDQELDINRLSDYDVDHIVPQSFLK |
| | | DDSIDNKVLTRSDKNRGKSDNVPSEEVVKKMKNYWRQLLNAKLITQ |
| | | RKFDNLTKAERGGLSELDKAGFIKRQLVETRQITKHVAQILDSRMNT |
| | | KYDENDKLIREVKVITLKSKLVSDFRKDFQFYKVREINNYHHAHDAY |
| | | LNAVVGTALIKKYPKLESEFVYGDYKVYDVRKMIAKSEQEIGKATAK |
| | | YFFYSNIMNFFKTEITLANGEIRKRPLIETNGEGSSGSETPGTSESAT |
| | | PESSGSEVEFSHEYWMRHALTLAKRARDEREVPVGAVLVLNNRVI |
| | | GEGWNRAIGLHDPTAHAEIMALRQGGLVMQNYRLIDATLYVTFEPC |
| | | VMCAGAMIHSRIGRVVFGVRNAKTGAAGSLMDVLHYPGMNHRVEI |
| | | TEGILADECAALLCYFFRMPRQVFNAQKKAQSSTDTGEIVWDKGR |
| | | DFATVRKVLSMPQVNIVKKTEVQTGGFSKESILPKRNSDKLIARKKD |
| | | WDPKKYGGFDSPTVAYSVLVVAKVEKGKSKKLKSVKELLGITIMER |
| | | SSFEKNPIDFLEAKGYKEVKKDLIIKLPKYSLFELENGRKRMLASAGE |
| | | LQKGNELALPSKYVNFLYLASHYEKLKGSPEDNEQKQLFVEQHKHY |
| | | LDEIIEQISEFSKRVILADANLDKVLSAYNKHRDKPIREQAENIIHLFTL |
| | | TNLGAPAAFKYFDTTIDRKRYTSTKEVLDATLIHQSITGLYETRIDLS |
| | | QLGGD |
| 106 Cas9 TadAins | 1320 | MDKKYSIGLAIGTNSVGWAVITDEYKVPSKKFKVLGNTDRHSIKKNLI |
| 1247 polypeptide | | GALLFDSGETAEATRLKRTARRRYTRRKNRICYLQEIFSNEMAKVD |
| sequence | | DSFFHRLEESFLVEEDKKHERHPIFGNIVDEVAYHEKYPTIYHLRKK |
| | | LVDSTDKADLRLIYLALAHMIKFRGHFLIEGDLNPDNSDVDKLFIQLV |
| | | QTYNQLFEENPINASGVDAKAILSARLSKSRRLENLIAQLPGEKKNG |
| | | LFGNLIALSLGLTPNFKSNFDLAEDAKLQLSKDTYDDDLDNLLAQIG |
| | | DQYADLFLAAKNLSDAILLSDILRVNTEITKAPLSASMIKRYDEHHQD |
| | | LTLLKALVRQQLPEKYKEIFFDQSKNGYAGYIDGGASQEEFYKFIKPI |
| | | LEKMDGTEELLVKLNREDLLRKQRTFDNGSIPHQIHLGELHAILRRQ |
| | | EDFYPFLKDNREKIEKILTFRIPYYVGPLARGNSRFAWMTRKSEETIT |
| | | PWNFEEVVDKGASAQSFIERMTNFDKNLPNEKVLPKHSLLYEYFTV |
| | | YNELTKVKYVTEGMRKPAFLSGEQKKAIVDLLFKTNRKVTVKQLKE |
| | | DYFKKIECFDSVEISGVEDRFNASLGTYHDLLKIIKDKDFLDNEENED |
| | | ILEDIVLTLTLFEDREMIEERLKTYAHLFDDKVMKQLKRRRYTGWGR |
| | | LSRKLINGIRDKQSGKTILDFLKSDGFANRNFMQLIHDDSLTFKEDIQ |
| | | KAQVSGQGDSLHEHIANLAGSPAIKKGILQTVKVVDELVKVMGRHK |
| | | PENIVIEMARENQTTQKGQKNSRERMKRIEEGIKELGSQILKEHPVE |
| | | NTQLQNEKLYLYYLQNGRDMYVDQELDINRLSDYDVDHIVPQSFLK |
| | | DDSIDNKVLTRSDKNRGKSDNVPSEEVVKKMKNYWRQLLNAKLITQ |
| | | RKFDNLTKAERGGLSELDKAGFIKRQLVETRQITKHVAQILDSRMNT |
| | | KYDENDKLIREVKVITLKSKLVSDFRKDFQFYKVREINNYHHAHDAY |
| | | LNAVVGTALIKKYPKLESEFVYGDYKVYDVRKMIAKSEQEIGKATAK |
| | | YFFYSNIMNFFKTEITLANGEIRKRPLIETNGETGEIVWDKGRDFATV |
| | | RKVLSMPQVNIVKKTEVQTGGFSKESILPKRNSDKLIARKKDWDPK |
| | | KYGGFDSPTVAYSVLVVAKVEKGKSKKLKSVKELLGITIMERSSFEK |
| | | NPIDFLEAKGYKEVKKDLIIKLPKYSLFELENGRKRMLASAGELQKG |
| | | NELALPSKYVNFLYLASHYEKLKGGSSGSETPGTSESATPESSGSE |
| | | VEFSHEYWMRHALTLAKRARDEREVPVGAVLVLNNRVIGEGWNRA |
| | | IGLHDPTAHAEIMALRQGGLVMQNYRLIDATLYVTFEPCVMCAGAMI |
| | | HSRIGRVVFGVRNAKTGAAGSLMDVLHYPGMNHRVEITEGILADEC |
| | | AALLCYFFRMPRQVFNAQKKAQSSTDSPEDNEQKQLFVEQHKHYL |
| | | DEIIEQISEFSKRVILADANLDKVLSAYNKHRDKPIREQAENIIHLFTLT |
| | | NLGAPAAFKYFDTTIDRKRYTSTKEVLDATLIHQSITGLYETRIDLSQ |
| | | LGGD |
| 107 Cas9 TadAins | 1321 | MDKKYSIGLAIGTNSVGWAVITDEYKVPSKKFKVLGNTDRHSIKKNLI |
| 1054 polypeptide | | GALLFDSGETAEATRLKRTARRRYTRRKNRICYLQEIFSNEMAKVD |
| sequence | | DSFFHRLEESFLVEEDKKHERHPIFGNIVDEVAYHEKYPTIYHLRKK |
| | | LVDSTDKADLRLIYLALAHMIKFRGHFLIEGDLNPDNSDVDKLFIQLV |
| | | QTYNQLFEENPINASGVDAKAILSARLSKSRRLENLIAQLPGEKKNG |
| | | LFGNLIALSLGLTPNFKSNFDLAEDAKLQLSKDTYDDDLDNLLAQIG |
| | | DQYADLFLAAKNLSDAILLSDILRVNTEITKAPLSASMIKRYDEHHQD |
| | | LTLLKALVRQQLPEKYKEIFFDQSKNGYAGYIDGGASQEEFYKFIKPI |
| | | LEKMDGTEELLVKLNREDLLRKQRTFDNGSIPHQIHLGELHAILRRQ |
| | | EDFYPFLKDNREKIEKILTFRIPYYVGPLARGNSRFAWMTRKSEETIT |
| | | PWNFEEVVDKGASAQSFIERMTNFDKNLPNEKVLPKHSLLYEYFTV |
| | | YNELTKVKYVTEGMRKPAFLSGEQKKAIVDLLFKTNRKVTVKQLKE |
| | | DYFKKIECFDSVEISGVEDRFNASLGTYHDLLKIIKDKDFLDNEENED |
| | | ILEDIVLTLTLFEDREMIEERLKTYAHLFDDKVMKQLKRRRYTGWGR |
| | | LSRKLINGIRDKQSGKTILDFLKSDGFANRNFMQLIHDDSLTFKEDIQ |
| | | KAQVSGQGDSLHEHIANLAGSPAIKKGILQTVKVVDELVKVMGRHK |
| | | PENIVIEMARENQTTQKGQKNSRERMKRIEEGIKELGSQILKEHPVE |
| | | NTQLQNEKLYLYYLQNGRDMYVDQELDINRLSDYDVDHIVPQSFLK |
| | | DDSIDNKVLTRSDKNRGKSDNVPSEEVVKKMKNYWRQLLNAKLITQ |
| | | RKFDNLTKAERGGLSELDKAGFIKRQLVETRQITKHVAQILDSRMNT |
| | | KYDENDKLIREVKVITLKSKLVSDFRKDFQFYKVREINNYHHAHDAY |
| | | LNAVVGTALIKKYPKLESEFVYGDYKVYDVRKMIAKSEQEIGKATAK |
| | | YFFYSNIMNFFKTEITLANGSSGSETPGTSESATPESSGSEVEFSHE |
| | | YWMRHALTLAKRARDEREVPVGAVLVLNNRVIGEGWNRAIGLHDP |
| | | TAHAEIMALRQGGLVMQNYRLIDATLYVTFEPCVMCAGAMIHSRIG |
| | | RVVFGVRNAKTGAAGSLMDVLHYPGMNHRVEITEGILADECAALLC |
| | | YFFRMPRQVFNAQKKAQSSTDGEIRKRPLIETNGETGEIVWDKGRD |
| | | FATVRKVLSMPQVNIVKKTEVQTGGFSKESILPKRNSDKLIARKKDW |
| | | DPKKYGGFDSPTVAYSVLVVAKVEKGKSKKLKSVKELLGITIMERSS |
| | | FEKNPIDFLEAKGYKEVKKDLIIKLPKYSLFELENGRKRMLASAGELQ |
| | | KGNELALPSKYVNFLYLASHYEKLKGSPEDNEQKQLFVEQHKHYLD |
| | | EIIEQISEFSKRVILADANLDKVLSAYNKHRDKPIREQAENIIHLFTLTN |
| | | LGAPAAFKYFDTTIDRKRYTSTKEVLDATLIHQSITGLYETRIDLSQL |
| | | GGD |
| 108 Cas9 TadAins | 1322 | MDKKYSIGLAIGTNSVGWAVITDEYKVPSKKFKVLGNTDRHSIKKNLI |
| 1026 polypeptide | | GALLFDSGETAEATRLKRTARRRYTRRKNRICYLQEIFSNEMAKVD |
| sequence | | DSFFHRLEESFLVEEDKKHERHPIFGNIVDEVAYHEKYPTIYHLRKK |
| | | LVDSTDKADLRLIYLALAHMIKFRGHFLIEGDLNPDNSDVDKLFIQLV |
| | | QTYNQLFEENPINASGVDAKAILSARLSKSRRLENLIAQLPGEKKNG |
| | | LFGNLIALSLGLTPNFKSNFDLAEDAKLQLSKDTYDDDLDNLLAQIG |
| | | DQYADLFLAAKNLSDAILLSDILRVNTEITKAPLSASMIKRYDEHHQD |
| | | LTLLKALVRQQLPEKYKEIFFDQSKNGYAGYIDGGASQEEFYKFIKPI |
| | | LEKMDGTEELLVKLNREDLLRKQRTFDNGSIPHQIHLGELHAILRRQ |
| | | EDFYPFLKDNREKIEKILTFRIPYYVGPLARGNSRFAWMTRKSEETIT |
| | | PWNFEEVVDKGASAQSFIERMTNFDKNLPNEKVLPKHSLLYEYFTV |
| | | YNELTKVKYVTEGMRKPAFLSGEQKKAIVDLLFKTNRKVTVKQLKE |
| | | DYFKKIECFDSVEISGVEDRFNASLGTYHDLLKIIKDKDFLDNEENED |
| | | ILEDIVLTLTLFEDREMIEERLKTYAHLFDDKVMKQLKRRRYTGWGR |
| | | LSRKLINGIRDKQSGKTILDFLKSDGFANRNFMQLIHDDSLTFKEDIQ |
| | | KAQVSGQGDSLHEHIANLAGSPAIKKGILQTVKVVDELVKVMGRHK |
| | | PENIVIEMARENQTTQKGQKNSRERMKRIEEGIKELGSQILKEHPVE |
| | | NTQLQNEKLYLYYLQNGRDMYVDQELDINRLSDYDVDHIVPQSFLK |
| | | DDSIDNKVLTRSDKNRGKSDNVPSEEVVKKMKNYWRQLLNAKLITQ |
| | | RKFDNLTKAERGGLSELDKAGFIKRQLVETRQITKHVAQILDSRMNT |
| | | KYDENDKLIREVKVITLKSKLVSDFRKDFQFYKVREINNYHHAHDAY |
| | | LNAVVGTALIKKYPKLESEFVYGDYKVYDVRKMIAKSEGSSGSETP |
| | | GTSESATPESSGSEVEFSHEYWMRHALTLAKRARDEREVPVGAVL |
| | | VLNNRVIGEGWNRAIGLHDPTAHAEIMALRQGGLVMQNYRLIDATL |
| | | YVTFEPCVMCAGAMIHSRIGRVVFGVRNAKTGAAGSLMDVLHYPG |
| | | MNHRVEITEGILADECAALLCYFFRMPRQVFNAQKKAQSSTDQEIG |
| | | KATAKYFFYSNIMNFFKTEITLANGEIRKRPLIETNGETGEIVWDKGR |
| | | DFATVRKVLSMPQVNIVKKTEVQTGGFSKESILPKRNSDKLIARKKD |
| | | WDPKKYGGFDSPTVAYSVLVVAKVEKGKSKKLKSVKELLGITIMER |
| | | SSFEKNPIDFLEAKGYKEVKKDLIIKLPKYSLFELENGRKRMLASAGE |
| | | LQKGNELALPSKYVNFLYLASHYEKLKGSPEDNEQKQLFVEQHKHY |
| | | LDEIIEQISEFSKRVILADANLDKVLSAYNKHRDKPIREQAENIIHLFTL |
| | | TNLGAPAAFKYFDTTIDRKRYTSTKEVLDATLIHQSITGLYETRIDLS |
| | | QLGGD |
| 109 Cas9 TadAins | 1323 | MDKKYSIGLAIGTNSVGWAVITDEYKVPSKKFKVLGNTDRHSIKKNLI |
| 768 polypeptide | | GALLFDSGETAEATRLKRTARRRYTRRKNRICYLQEIFSNEMAKVD |
| sequence | | DSFFHRLEESFLVEEDKKHERHPIFGNIVDEVAYHEKYPTIYHLRKK |
| | | LVDSTDKADLRLIYLALAHMIKFRGHFLIEGDLNPDNSDVDKLFIQLV |
| | | QTYNQLFEENPINASGVDAKAILSARLSKSRRLENLIAQLPGEKKNG |
| | | LFGNLIALSLGLTPNFKSNFDLAEDAKLQLSKDTYDDDLDNLLAQIG |
| | | DQYADLFLAAKNLSDAILLSDILRVNTEITKAPLSASMIKRYDEHHQD |
| | | LTLLKALVRQQLPEKYKEIFFDQSKNGYAGYIDGGASQEEFYKFIKPI |
| | | LEKMDGTEELLVKLNREDLLRKQRTFDNGSIPHQIHLGELHAILRRQ |
| | | EDFYPFLKDNREKIEKILTFRIPYYVGPLARGNSRFAWMTRKSEETIT |
| | | PWNFEEVVDKGASAQSFIERMTNFDKNLPNEKVLPKHSLLYEYFTV |
| | | YNELTKVKYVTEGMRKPAFLSGEQKKAIVDLLFKTNRKVTVKQLKE |
| | | DYFKKIECFDSVEISGVEDRFNASLGTYHDLLKIIKDKDFLDNEENED |
| | | ILEDIVLTLTLFEDREMIEERLKTYAHLFDDKVMKQLKRRRYTGWGR |
| | | LSRKLINGIRDKQSGKTILDFLKSDGFANRNFMQLIHDDSLTFKEDIQ |
| | | KAQVSGQGDSLHEHIANLAGSPAIKKGILQTVKVVDELVKVMGRHK |
| | | PENIVIEMARENQGSSGSETPGTSESATPESSGSEVEFSHEYWMR |
| | | HALTLAKRARDEREVPVGAVLVLNNRVIGEGWNRAIGLHDPTAHAE |
| | | IMALRQGGLVMQNYRLIDATLYVTFEPCVMCAGAMIHSRIGRVVFG |
| | | VRNAKTGAAGSLMDVLHYPGMNHRVEITEGILADECAALLCYFFRM |
| | | PRTTQKGQKNSRERMKRIEEGIKELGSQILKEHPVENTQLQNEKLY |
| | | LYYLQNGRDMYVDQELDINRLSDYDVDHIVPQSFLKDDSIDNKVLT |
| | | RSDKNRGKSDNVPSEEVVKKMKNYWRQLLNAKLITQRKFDNLTKA |
| | | ERGGLSELDKAGFIKRQLVETRQITKHVAQILDSRMNTKYDENDKLI |
| | | REVKVITLKSKLVSDFRKDFQFYKVREINNYHHAHDAYLNAVVGTAL |
| | | IKKYPKLESEFVYGDYKVYDVRKMIAKSEQEIGKATAKYFFYSNIMN |
| | | FFKTEITLANGEIRKRPLIETNGETGEIVWDKGRDFATVRKVLSMPQ |
| | | VNIVKKTEVQTGGFSKESILPKRNSDKLIARKKDWDPKKYGGFDSP |
| | | TVAYSVLVVAKVEKGKSKKLKSVKELLGITIMERSSFEKNPIDFLEAK |
| | | GYKEVKKDLIIKLPKYSLFELENGRKRMLASAGELQKGNELALPSKY |
| | | VNFLYLASHYEKLKGSPEDNEQKQLFVEQHKHYLDEIIEQISEFSKR |
| | | VILADANLDKVLSAYNKHRDKPIREQAENIIHLFTLTNLGAPAAFKYF |
| | | DTTIDRKRYTSTKEVLDATLIHQSITGLYETRIDLSQLGGD |
| 110.1 Cas9 | 1324 | MDKKYSIGLAIGTNSVGWAVITDEYKVPSKKFKVLGNTDRHSIKKNLI |
| TadAins 1250 | | GALLFDSGETAEATRLKRTARRRYTRRKNRICYLQEIFSNEMAKVD |
| polypeptide | | DSFFHRLEESFLVEEDKKHERHPIFGNIVDEVAYHEKYPTIYHLRKK |
| sequence | | LVDSTDKADLRLIYLALAHMIKFRGHFLIEGDLNPDNSDVDKLFIQLV |
| | | QTYNQLFEENPINASGVDAKAILSARLSKSRRLENLIAQLPGEKKNG |
| | | LFGNLIALSLGLTPNFKSNFDLAEDAKLQLSKDTYDDDLDNLLAQIG |
| | | DQYADLFLAAKNLSDAILLSDILRVNTEITKAPLSASMIKRYDEHHQD |
| | | LTLLKALVRQQLPEKYKEIFFDQSKNGYAGYIDGGASQEEFYKFIKPI |
| | | LEKMDGTEELLVKLNREDLLRKQRTFDNGSIPHQIHLGELHAILRRQ |
| | | EDFYPFLKDNREKIEKILTFRIPYYVGPLARGNSRFAWMTRKSEETIT |
| | | PWNFEEVVDKGASAQSFIERMTNFDKNLPNEKVLPKHSLLYEYFTV |
| | | YNELTKVKYVTEGMRKPAFLSGEQKKAIVDLLFKTNRKVTVKQLKE |
| | | DYFKKIECFDSVEISGVEDRFNASLGTYHDLLKIIKDKDFLDNEENED |
| | | ILEDIVLTLTLFEDREMIEERLKTYAHLFDDKVMKQLKRRRYTGWGR |
| | | LSRKLINGIRDKQSGKTILDFLKSDGFANRNFMQLIHDDSLTFKEDIQ |
| | | KAQVSGQGDSLHEHIANLAGSPAIKKGILQTVKVVDELVKVMGRHK |
| | | PENIVIEMARENQTTQKGQKNSRERMKRIEEGIKELGSQILKEHPVE |
| | | NTQLQNEKLYLYYLQNGRDMYVDQELDINRLSDYDVDHIVPQSFLK |
| | | DDSIDNKVLTRSDKNRGKSDNVPSEEVVKKMKNYWRQLLNAKLITQ |
| | | RKFDNLTKAERGGLSELDKAGFIKRQLVETRQITKHVAQILDSRMNT |
| | | KYDENDKLIREVKVITLKSKLVSDFRKDFQFYKVREINNYHHAHDAY |
| | | LNAVVGTALIKKYPKLESEFVYGDYKVYDVRKMIAKSEQEIGKATAK |
| | | YFFYSNIMNFFKTEITLANGEIRKRPLIETNGETGEIVWDKGRDFATV |
| | | RKVLSMPQVNIVKKTEVQTGGFSKESILPKRNSDKLIARKKDWDPK |
| | | KYGGFDSPTVAYSVLVVAKVEKGKSKKLKSVKELLGITIMERSSFEK |
| | | NPIDFLEAKGYKEVKKDLIIKLPKYSLFELENGRKRMLASAGELQKG |
| | | NELALPSKYVNFLYLASHYEKLKGSPGSSGSETPGTSESATPESSG |
| | | SEVEFSHEYWMRHALTLAKRARDEREVPVGAVLVLNNRVIGEGWN |
| | | RAIGLHDPTAHAEIMALRQGGLVMQNYRLIDATLYVTFEPCVMCAG |
| | | AMIHSRIGRVVFGVRNAKTGAAGSLMDVLHYPGMNHRVEITEGILA |
| | | DECAALLCYFFRMPREDNEQKQLFVEQHKHYLDEIIEQISEFSKRVI |
| | | LADANLDKVLSAYNKHRDKPIREQAENIIHLFTLTNLGAPAAFKYFDT |
| | | TIDRKRYTSTKEVLDATLIHQSITGLYETRIDLSQLGGD |
| 110.2 Cas9 | 1325 | MDKKYSIGLAIGTNSVGWAVITDEYKVPSKKFKVLGNTDRHSIKKNLI |
| TadAins 1250 | | GALLFDSGETAEATRLKRTARRRYTRRKNRICYLQEIFSNEMAKVD |
| polypeptide | | DSFFHRLEESFLVEEDKKHERHPIFGNIVDEVAYHEKYPTIYHLRKK |
| sequence | | LVDSTDKADLRLIYLALAHMIKFRGHFLIEGDLNPDNSDVDKLFIQLV |
| | | QTYNQLFEENPINASGVDAKAILSARLSKSRRLENLIAQLPGEKKNG |
| | | LFGNLIALSLGLTPNFKSNFDLAEDAKLQLSKDTYDDDLDNLLAQIG |
| | | DQYADLFLAAKNLSDAILLSDILRVNTEITKAPLSASMIKRYDEHHQD |
| | | LTLLKALVRQQLPEKYKEIFFDQSKNGYAGYIDGGASQEEFYKFIKPI |
| | | LEKMDGTEELLVKLNREDLLRKQRTFDNGSIPHQIHLGELHAILRRQ |
| | | EDFYPFLKDNREKIEKILTFRIPYYVGPLARGNSRFAWMTRKSEETIT |
| | | PWNFEEVVDKGASAQSFIERMTNFDKNLPNEKVLPKHSLLYEYFTV |
| | | YNELTKVKYVTEGMRKPAFLSGEQKKAIVDLLFKTNRKVTVKQLKE |
| | | DYFKKIECFDSVEISGVEDRFNASLGTYHDLLKIIKDKDFLDNEENED |
| | | ILEDIVLTLTLFEDREMIEERLKTYAHLFDDKVMKQLKRRRYTGWGR |
| | | LSRKLINGIRDKQSGKTILDFLKSDGFANRNFMQLIHDDSLTFKEDIQ |
| | | KAQVSGQGDSLHEHIANLAGSPAIKKGILQTVKVVDELVKVMGRHK |
| | | PENIVIEMARENQTTQKGQKNSRERMKRIEEGIKELGSQILKEHPVE |
| | | NTQLQNEKLYLYYLQNGRDMYVDQELDINRLSDYDVDHIVPQSFLK |
| | | DDSIDNKVLTRSDKNRGKSDNVPSEEVVKKMKNYWRQLLNAKLITQ |
| | | RKFDNLTKAERGGLSELDKAGFIKRQLVETRQITKHVAQILDSRMNT |
| | | KYDENDKLIREVKVITLKSKLVSDFRKDFQFYKVREINNYHHAHDAY |
| | | LNAVVGTALIKKYPKLESEFVYGDYKVYDVRKMIAKSEQEIGKATAK |
| | | YFFYSNIMNFFKTEITLANGEIRKRPLIETNGETGEIVWDKGRDFATV |
| | | RKVLSMPQVNIVKKTEVQTGGFSKESILPKRNSDKLIARKKDWDPK |
| | | KYGGFDSPTVAYSVLVVAKVEKGKSKKLKSVKELLGITIMERSSFEK |
| | | NPIDFLEAKGYKEVKKDLIIKLPKYSLFELENGRKRMLASAGELQKG |
| | | NELALPSKYVNFLYLASHYEKLKGSPGSSGSSGSETPGTSESATPE |
| | | SSGSEVEFSHEYWMRHALTLAKRARDEREVPVGAVLVLNNRVIGE |
| | | GWNRAIGLHDPTAHAEIMALRQGGLVMQNYRLIDATLYVTFEPCVM |
| | | CAGAMIHSRIGRVVFGVRNAKTGAAGSLMDVLHYPGMNHRVEITE |
| | | GILADECAALLCYFFRMPREDNEQKQLFVEQHKHYLDEIIEQISEFS |
| | | KRVILADANLDKVLSAYNKHRDKPIREQAENIIHLFTLTNLGAPAAFK |
| | | YFDTTIDRKRYTSTKEVLDATLIHQSITGLYETRIDLSQLGGD |
| 110.3 Cas9 | 1326 | MDKKYSIGLAIGTNSVGWAVITDEYKVPSKKFKVLGNTDRHSIKKNLI |
| TadAins 1250 | | GALLFDSGETAEATRLKRTARRRYTRRKNRICYLQEIFSNEMAKVD |
| polypeptide | | DSFFHRLEESFLVEEDKKHERHPIFGNIVDEVAYHEKYPTIYHLRKK |
| sequence | | LVDSTDKADLRLIYLALAHMIKFRGHFLIEGDLNPDNSDVDKLFIQLV |
| | | QTYNQLFEENPINASGVDAKAILSARLSKSRRLENLIAQLPGEKKNG |
| | | LFGNLIALSLGLTPNFKSNFDLAEDAKLQLSKDTYDDDLDNLLAQIG |
| | | DQYADLFLAAKNLSDAILLSDILRVNTEITKAPLSASMIKRYDEHHQD |
| | | LTLLKALVRQQLPEKYKEIFFDQSKNGYAGYIDGGASQEEFYKFIKPI |
| | | LEKMDGTEELLVKLNREDLLRKQRTFDNGSIPHQIHLGELHAILRRQ |
| | | EDFYPFLKDNREKIEKILTFRIPYYVGPLARGNSRFAWMTRKSEETIT |
| | | PWNFEEVVDKGASAQSFIERMTNFDKNLPNEKVLPKHSLLYEYFTV |
| | | YNELTKVKYVTEGMRKPAFLSGEQKKAIVDLLFKTNRKVTVKQLKE |
| | | DYFKKIECFDSVEISGVEDRFNASLGTYHDLLKIIKDKDFLDNEENED |
| | | ILEDIVLTLTLFEDREMIEERLKTYAHLFDDKVMKQLKRRRYTGWGR |
| | | LSRKLINGIRDKQSGKTILDFLKSDGFANRNFMQLIHDDSLTFKEDIQ |
| | | KAQVSGQGDSLHEHIANLAGSPAIKKGILQTVKVVDELVKVMGRHK |
| | | PENIVIEMARENQTTQKGQKNSRERMKRIEEGIKELGSQILKEHPVE |
| | | NTQLQNEKLYLYYLQNGRDMYVDQELDINRLSDYDVDHIVPQSFLK |
| | | DDSIDNKVLTRSDKNRGKSDNVPSEEVVKKMKNYWRQLLNAKLITQ |
| | | RKFDNLTKAERGGLSELDKAGFIKRQLVETRQITKHVAQILDSRMNT |
| | | KYDENDKLIREVKVITLKSKLVSDFRKDFQFYKVREINNYHHAHDAY |
| | | LNAVVGTALIKKYPKLESEFVYGDYKVYDVRKMIAKSEQEIGKATAK |
| | | YFFYSNIMNFFKTEITLANGEIRKRPLIETNGETGEIVWDKGRDFATV |
| | | RKVLSMPQVNIVKKTEVQTGGFSKESILPKRNSDKLIARKKDWDPK |
| | | KYGGFDSPTVAYSVLVVAKVEKGKSKKLKSVKELLGITIMERSSFEK |
| | | NPIDFLEAKGYKEVKKDLIIKLPKYSLFELENGRKRMLASAGELQKG |
| | | NELALPSKYVNFLYLASHYEKLKGSPGSSGSSGSETPGTSESATPE |
| | | SGSSSGSEVEFSHEYWMRHALTLAKRARDEREVPVGAVLVLNNRV |
| | | IGEGWNRAIGLHDPTAHAEIMALRQGGLVMQNYRLIDATLYVTFEP |
| | | CVMCAGAMIHSRIGRVVFGVRNAKTGAAGSLMDVLHYPGMNHRV |
| | | EITEGILADECAALLCYFFRMPREDNEQKQLFVEQHKHYLDEIIEQIS |
| | | EFSKRVILADANLDKVLSAYNKHRDKPIREQAENIIHLFTLTNLGAPA |
| | | AFKYFDTTIDRKRYTSTKEVLDATLIHQSITGLYETRIDLSQLGGD |
| 110.4 Cas9 | 1327 | MDKKYSIGLAIGTNSVGWAVITDEYKVPSKKFKVLGNTDRHSIKKNLI |
| TadAins 1250 | | GALLFDSGETAEATRLKRTARRRYTRRKNRICYLQEIFSNEMAKVD |
| polypeptide | | DSFFHRLEESFLVEEDKKHERHPIFGNIVDEVAYHEKYPTIYHLRKK |
| sequence | | LVDSTDKADLRLIYLALAHMIKFRGHFLIEGDLNPDNSDVDKLFIQLV |
| | | QTYNQLFEENPINASGVDAKAILSARLSKSRRLENLIAQLPGEKKNG |
| | | LFGNLIALSLGLTPNFKSNFDLAEDAKLQLSKDTYDDDLDNLLAQIG |
| | | DQYADLFLAAKNLSDAILLSDILRVNTEITKAPLSASMIKRYDEHHQD |
| | | LTLLKALVRQQLPEKYKEIFFDQSKNGYAGYIDGGASQEEFYKFIKPI |
| | | LEKMDGTEELLVKLNREDLLRKQRTFDNGSIPHQIHLGELHAILRRQ |
| | | EDFYPFLKDNREKIEKILTFRIPYYVGPLARGNSRFAWMTRKSEETIT |
| | | PWNFEEVVDKGASAQSFIERMTNFDKNLPNEKVLPKHSLLYEYFTV |
| | | YNELTKVKYVTEGMRKPAFLSGEQKKAIVDLLFKTNRKVTVKQLKE |
| | | DYFKKIECFDSVEISGVEDRFNASLGTYHDLLKIIKDKDFLDNEENED |
| | | ILEDIVLTLTLFEDREMIEERLKTYAHLFDDKVMKQLKRRRYTGWGR |
| | | LSRKLINGIRDKQSGKTILDFLKSDGFANRNFMQLIHDDSLTFKEDIQ |
| | | KAQVSGQGDSLHEHIANLAGSPAIKKGILQTVKVVDELVKVMGRHK |
| | | PENIVIEMARENQTTQKGQKNSRERMKRIEEGIKELGSQILKEHPVE |
| | | NTQLQNEKLYLYYLQNGRDMYVDQELDINRLSDYDVDHIVPQSFLK |
| | | DDSIDNKVLTRSDKNRGKSDNVPSEEVVKKMKNYWRQLLNAKLITQ |
| | | RKFDNLTKAERGGLSELDKAGFIKRQLVETRQITKHVAQILDSRMNT |
| | | KYDENDKLIREVKVITLKSKLVSDFRKDFQFYKVREINNYHHAHDAY |
| | | LNAVVGTALIKKYPKLESEFVYGDYKVYDVRKMIAKSEQEIGKATAK |
| | | YFFYSNIMNFFKTEITLANGEIRKRPLIETNGETGEIVWDKGRDFATV |
| | | RKVLSMPQVNIVKKTEVQTGGFSKESILPKRNSDKLIARKKDWDPK |
| | | KYGGFDSPTVAYSVLVVAKVEKGKSKKLKSVKELLGITIMERSSFEK |
| | | NPIDFLEAKGYKEVKKDLIIKLPKYSLFELENGRKRMLASAGELQKG |
| | | NELALPSKYVNFLYLASHYEKLKGSPGSSGSSGSETPGTSESATPE |
| | | SGSSSGSEVEFSHEYWMRHALTLAKRARDEREVPVGAVLVLNNRV |
| | | IGEGWNRAIGLHDPTAHAEIMALRQGGLVMQNYRLIDATLYVTFEP |
| | | CVMCAGAMIHSRIGRVVFGVRNAKTGAAGSLMDVLHYPGMNHRV |
| | | EITEGILADECAALLCYFFRMRREDNEQKQLFVEQHKHYLDEIIEQIS |
| | | EFSKRVILADANLDKVLSAYNKHRDKPIREQAENIIHLFTLTNLGAPA |
| | | AFKYFDTTIDRKRYTSTKEVLDATLIHQSITGLYETRIDLSQLGGD |
| 110.5 Cas9 | 1328 | MDKKYSIGLAIGTNSVGWAVITDEYKVPSKKFKVLGNTDRHSIKKNLI |
| TadAins 1249 | | GALLFDSGETAEATRLKRTARRRYTRRKNRICYLQEIFSNEMAKVD |
| polypeptide | | DSFFHRLEESFLVEEDKKHERHPIFGNIVDEVAYHEKYPTIYHLRKK |
| sequence | | LVDSTDKADLRLIYLALAHMIKFRGHFLIEGDLNPDNSDVDKLFIQLV |
| | | QTYNQLFEENPINASGVDAKAILSARLSKSRRLENLIAQLPGEKKNG |
| | | LFGNLIALSLGLTPNFKSNFDLAEDAKLQLSKDTYDDDLDNLLAQIG |
| | | DQYADLFLAAKNLSDAILLSDILRVNTEITKAPLSASMIKRYDEHHQD |
| | | LTLLKALVRQQLPEKYKEIFFDQSKNGYAGYIDGGASQEEFYKFIKPI |
| | | LEKMDGTEELLVKLNREDLLRKQRTFDNGSIPHQIHLGELHAILRRQ |
| | | EDFYPFLKDNREKIEKILTFRIPYYVGPLARGNSRFAWMTRKSEETIT |
| | | PWNFEEVVDKGASAQSFIERMTNFDKNLPNEKVLPKHSLLYEYFTV |
| | | YNELTKVKYVTEGMRKPAFLSGEQKKAIVDLLFKTNRKVTVKQLKE |
| | | DYFKKIECFDSVEISGVEDRFNASLGTYHDLLKIIKDKDFLDNEENED |
| | | ILEDIVLTLTLFEDREMIEERLKTYAHLFDDKVMKQLKRRRYTGWGR |
| | | LSRKLINGIRDKQSGKTILDFLKSDGFANRNFMQLIHDDSLTFKEDIQ |
| | | KAQVSGQGDSLHEHIANLAGSPAIKKGILQTVKVVDELVKVMGRHK |
| | | PENIVIEMARENQTTQKGQKNSRERMKRIEEGIKELGSQILKEHPVE |
| | | NTQLQNEKLYLYYLQNGRDMYVDQELDINRLSDYDVDHIVPQSFLK |
| | | DDSIDNKVLTRSDKNRGKSDNVPSEEVVKKMKNYWRQLLNAKLITQ |
| | | RKFDNLTKAERGGLSELDKAGFIKRQLVETRQITKHVAQILDSRMNT |
| | | KYDENDKLIREVKVITLKSKLVSDFRKDFQFYKVREINNYHHAHDAY |
| | | LNAVVGTALIKKYPKLESEFVYGDYKVYDVRKMIAKSEQEIGKATAK |
| | | YFFYSNIMNFFKTEITLANGEIRKRPLIETNGETGEIVWDKGRDFATV |
| | | RKVLSMPQVNIVKKTEVQTGGFSKESILPKRNSDKLIARKKDWDPK |
| | | KYGGFDSPTVAYSVLVVAKVEKGKSKKLKSVKELLGITIMERSSFEK |
| | | NPIDFLEAKGYKEVKKDLIIKLPKYSLFELENGRKRMLASAGELQKG |
| | | NELALPSKYVNFLYLASHYEKLKGSGSSGSSGSETPGTSESATPES |
| | | GSSSGSEVEFSHEYWMRHALTLAKRARDEREVPVGAVLVLNNRVI |
| | | GEGWNRAIGLHDPTAHAEIMALRQGGLVMQNYRLIDATLYVTFEPC |
| | | VMCAGAMIHSRIGRVVFGVRNAKTGAAGSLMDVLHYPGMNHRVEI |
| | | TEGILADECAALLCYFFRMRRPEDNEQKQLFVEQHKHYLDEIIEQIS |
| | | EFSKRVILADANLDKVLSAYNKHRDKPIREQAENIIHLFTLTNLGAPA |
| | | AFKYFDTTIDRKRYTSTKEVLDATLIHQSITGLYETRIDLSQLGGD |
| 110.5 Cas9 | 1329 | MDKKYSIGLAIGTNSVGWAVITDEYKVPSKKFKVLGNTDRHSIKKNLI |
| TadAins delta 59- | | GALLFDSGETAEATRLKRTARRRYTRRKNRICYLQEIFSNEMAKVD |
| 66 1250 | | DSFFHRLEESFLVEEDKKHERHPIFGNIVDEVAYHEKYPTIYHLRKK |
| polypeptide | | LVDSTDKADLRLIYLALAHMIKFRGHFLIEGDLNPDNSDVDKLFIQLV |
| sequence | | QTYNQLFEENPINASGVDAKAILSARLSKSRRLENLIAQLPGEKKNG |
| | | LFGNLIALSLGLTPNFKSNFDLAEDAKLQLSKDTYDDDLDNLLAQIG |
| | | DQYADLFLAAKNLSDAILLSDILRVNTEITKAPLSASMIKRYDEHHQD |
| | | LTLLKALVRQQLPEKYKEIFFDQSKNGYAGYIDGGASQEEFYKFIKPI |
| | | LEKMDGTEELLVKLNREDLLRKQRTFDNGSIPHQIHLGELHAILRRQ |
| | | EDFYPFLKDNREKIEKILTFRIPYYVGPLARGNSRFAWMTRKSEETIT |
| | | PWNFEEVVDKGASAQSFIERMTNFDKNLPNEKVLPKHSLLYEYFTV |
| | | YNELTKVKYVTEGMRKPAFLSGEQKKAIVDLLFKTNRKVTVKQLKE |
| | | DYFKKIECFDSVEISGVEDRFNASLGTYHDLLKIIKDKDFLDNEENED |
| | | ILEDIVLTLTLFEDREMIEERLKTYAHLFDDKVMKQLKRRRYTGWGR |
| | | LSRKLINGIRDKQSGKTILDFLKSDGFANRNFMQLIHDDSLTFKEDIQ |
| | | KAQVSGQGDSLHEHIANLAGSPAIKKGILQTVKVVDELVKVMGRHK |
| | | PENIVIEMARENQTTQKGQKNSRERMKRIEEGIKELGSQILKEHPVE |
| | | NTQLQNEKLYLYYLQNGRDMYVDQELDINRLSDYDVDHIVPQSFLK |
| | | DDSIDNKVLTRSDKNRGKSDNVPSEEVVKKMKNYWRQLLNAKLITQ |
| | | RKFDNLTKAERGGLSELDKAGFIKRQLVETRQITKHVAQILDSRMNT |
| | | KYDENDKLIREVKVITLKSKLVSDFRKDFQFYKVREINNYHHAHDAY |
| | | LNAVVGTALIKKYPKLESEFVYGDYKVYDVRKMIAKSEQEIGKATAK |
| | | YFFYSNIMNFFKTEITLANGEIRKRPLIETNGETGEIVWDKGRDFATV |
| | | RKVLSMPQVNIVKKTEVQTGGFSKESILPKRNSDKLIARKKDWDPK |
| | | KYGGFDSPTVAYSVLVVAKVEKGKSKKLKSVKELLGITIMERSSFEK |
| | | NPIDFLEAKGYKEVKKDLIIKLPKYSLFELENGRKRMLASAGELQKG |
| | | NELALPSKYVNFLYLASHYEKLKGSPGSSGSSGSETPGTSESATPE |
| | | SGSSGSEVEFSHEYWMRHALTLAKRARDEREVPVGAVLVLNNRVI |
| | | GEGWNRAHAEIMALRQGGLVMQNYRLIDATLYVTFEPCVMCAGAM |
| | | IHSRIGRVVFGVRNAKTGAAGSLMDVLHYPGMNHRVEITEGILADE |
| | | CAALLCYFFRMPRQVFNAQKKAQSSTDEDNEQKQLFVEQHKHYLD |
| | | EIIEQISEFSKRVILADANLDKVLSAYNKHRDKPIREQAENIIHLFTLTN |
| | | LGAPAAFKYFDTTIDRKRYTSTKEVLDATLIHQSITGLYETRIDLSQL |
| | | GGD |
| 110.6 Cas9 | 1330 | MDKKYSIGLAIGTNSVGWAVITDEYKVPSKKFKVLGNTDRHSIKKNLI |
| TadAins 1251 | | GALLFDSGETAEATRLKRTARRRYTRRKNRICYLQEIFSNEMAKVD |
| polypeptide | | DSFFHRLEESFLVEEDKKHERHPIFGNIVDEVAYHEKYPTIYHLRKK |
| sequence | | LVDSTDKADLRLIYLALAHMIKFRGHFLIEGDLNPDNSDVDKLFIQLV |
| | | QTYNQLFEENPINASGVDAKAILSARLSKSRRLENLIAQLPGEKKNG |
| | | LFGNLIALSLGLTPNFKSNFDLAEDAKLQLSKDTYDDDLDNLLAQIG |
| | | DQYADLFLAAKNLSDAILLSDILRVNTEITKAPLSASMIKRYDEHHQD |
| | | LTLLKALVRQQLPEKYKEIFFDQSKNGYAGYIDGGASQEEFYKFIKPI |
| | | LEKMDGTEELLVKLNREDLLRKQRTFDNGSIPHQIHLGELHAILRRQ |
| | | EDFYPFLKDNREKIEKILTFRIPYYVGPLARGNSRFAWMTRKSEETIT |
| | | PWNFEEVVDKGASAQSFIERMTNFDKNLPNEKVLPKHSLLYEYFTV |
| | | YNELTKVKYVTEGMRKPAFLSGEQKKAIVDLLFKTNRKVTVKQLKE |
| | | DYFKKIECFDSVEISGVEDRFNASLGTYHDLLKIIKDKDFLDNEENED |
| | | ILEDIVLTLTLFEDREMIEERLKTYAHLFDDKVMKQLKRRRYTGWGR |
| | | LSRKLINGIRDKQSGKTILDFLKSDGFANRNFMQLIHDDSLTFKEDIQ |
| | | KAQVSGQGDSLHEHIANLAGSPAIKKGILQTVKVVDELVKVMGRHK |
| | | PENIVIEMARENQTTQKGQKNSRERMKRIEEGIKELGSQILKEHPVE |
| | | NTQLQNEKLYLYYLQNGRDMYVDQELDINRLSDYDVDHIVPQSFLK |
| | | DDSIDNKVLTRSDKNRGKSDNVPSEEVVKKMKNYWRQLLNAKLITQ |
| | | RKFDNLTKAERGGLSELDKAGFIKRQLVETRQITKHVAQILDSRMNT |
| | | KYDENDKLIREVKVITLKSKLVSDFRKDFQFYKVREINNYHHAHDAY |
| | | LNAVVGTALIKKYPKLESEFVYGDYKVYDVRKMIAKSEQEIGKATAK |
| | | YFFYSNIMNFFKTEITLANGEIRKRPLIETNGETGEIVWDKGRDFATV |
| | | RKVLSMPQVNIVKKTEVQTGGFSKESILPKRNSDKLIARKKDWDPK |
| | | KYGGFDSPTVAYSVLVVAKVEKGKSKKLKSVKELLGITIMERSSFEK |
| | | NPIDFLEAKGYKEVKKDLIIKLPKYSLFELENGRKRMLASAGELQKG |
| | | NELALPSKYVNFLYLASHYEKLKGSPEGSSGSSGSETPGTSESATP |
| | | ESGSSSGSEVEFSHEYWMRHALTLAKRARDEREVPVGAVLVLNNR |
| | | VIGEGWNRAIGLHDPTAHAEIMALRQGGLVMQNYRLIDATLYVTFE |
| | | PCVMCAGAMIHSRIGRVVFGVRNAKTGAAGSLMDVLHYPGMNHR |
| | | VEITEGILADECAALLCYFFRMRRDNEQKQLFVEQHKHYLDEIIEQIS |
| | | EFSKRVILADANLDKVLSAYNKHRDKPIREQAENIIHLFTLTNLGAPA |
| | | AFKYFDTTIDRKRYTSTKEVLDATLIHQSITGLYETRIDLSQLGGD |
| 110.7 Cas9 | 1331 | MDKKYSIGLAIGTNSVGWAVITDEYKVPSKKFKVLGNTDRHSIKKNLI |
| TadAins 1252 | | GALLFDSGETAEATRLKRTARRRYTRRKNRICYLQEIFSNEMAKVD |
| polypeptide | | DSFFHRLEESFLVEEDKKHERHPIFGNIVDEVAYHEKYPTIYHLRKK |
| sequence | | LVDSTDKADLRLIYLALAHMIKFRGHFLIEGDLNPDNSDVDKLFIQLV |
| | | QTYNQLFEENPINASGVDAKAILSARLSKSRRLENLIAQLPGEKKNG |
| | | LFGNLIALSLGLTPNFKSNFDLAEDAKLQLSKDTYDDDLDNLLAQIG |
| | | DQYADLFLAAKNLSDAILLSDILRVNTEITKAPLSASMIKRYDEHHQD |
| | | LTLLKALVRQQLPEKYKEIFFDQSKNGYAGYIDGGASQEEFYKFIKPI |
| | | LEKMDGTEELLVKLNREDLLRKQRTFDNGSIPHQIHLGELHAILRRQ |
| | | EDFYPFLKDNREKIEKILTFRIPYYVGPLARGNSRFAWMTRKSEETIT |
| | | PWNFEEVVDKGASAQSFIERMTNFDKNLPNEKVLPKHSLLYEYFTV |
| | | YNELTKVKYVTEGMRKPAFLSGEQKKAIVDLLFKTNRKVTVKQLKE |
| | | DYFKKIECFDSVEISGVEDRFNASLGTYHDLLKIIKDKDFLDNEENED |
| | | ILEDIVLTLTLFEDREMIEERLKTYAHLFDDKVMKQLKRRRYTGWGR |
| | | LSRKLINGIRDKQSGKTILDFLKSDGFANRNFMQLIHDDSLTFKEDIQ |
| | | KAQVSGQGDSLHEHIANLAGSPAIKKGILQTVKVVDELVKVMGRHK |
| | | PENIVIEMARENQTTQKGQKNSRERMKRIEEGIKELGSQILKEHPVE |
| | | NTQLQNEKLYLYYLQNGRDMYVDQELDINRLSDYDVDHIVPQSFLK |
| | | DDSIDNKVLTRSDKNRGKSDNVPSEEVVKKMKNYWRQLLNAKLITQ |
| | | RKFDNLTKAERGGLSELDKAGFIKRQLVETRQITKHVAQILDSRMNT |
| | | KYDENDKLIREVKVITLKSKLVSDFRKDFQFYKVREINNYHHAHDAY |
| | | LNAVVGTALIKKYPKLESEFVYGDYKVYDVRKMIAKSEQEIGKATAK |
| | | YFFYSNIMNFFKTEITLANGEIRKRPLIETNGETGEIVWDKGRDFATV |
| | | RKVLSMPQVNIVKKTEVQTGGFSKESILPKRNSDKLIARKKDWDPK |
| | | KYGGFDSPTVAYSVLVVAKVEKGKSKKLKSVKELLGITIMERSSFEK |
| | | NPIDFLEAKGYKEVKKDLIIKLPKYSLFELENGRKRMLASAGELQKG |
| | | NELALPSKYVNFLYLASHYEKLKGSPEDGSSGSSGSETPGTSESAT |
| | | PESGSSSGSEVEFSHEYWMRHALTLAKRARDEREVPVGAVLVLNN |
| | | RVIGEGWNRAIGLHDPTAHAEIMALRQGGLVMQNYRLIDATLYVTF |
| | | EPCVMCAGAMIHSRIGRVVFGVRNAKTGAAGSLMDVLHYPGMNH |
| | | RVEITEGILADECAALLCYFFRMRRNEQKQLFVEQHKHYLDEIIEQIS |
| | | EFSKRVILADANLDKVLSAYNKHRDKPIREQAENIIHLFTLTNLGAPA |
| | | AFKYFDTTIDRKRYTSTKEVLDATLIHQSITGLYETRIDLSQLGGD |
| 110.8 Cas9 | 1332 | MDKKYSIGLAIGTNSVGWAVITDEYKVPSKKFKVLGNTDRHSIKKNLI |
| TadAins delta | | GALLFDSGETAEATRLKRTARRRYTRRKNRICYLQEIFSNEMAKVD |
| 59-66 C-truncate | | DSFFHRLEESFLVEEDKKHERHPIFGNIVDEVAYHEKYPTIYHLRKK |
| 1250 polypeptide | | LVDSTDKADLRLIYLALAHMIKFRGHFLIEGDLNPDNSDVDKLFIQLV |
| sequence | | QTYNQLFEENPINASGVDAKAILSARLSKSRRLENLIAQLPGEKKNG |
| | | LFGNLIALSLGLTPNFKSNFDLAEDAKLQLSKDTYDDDLDNLLAQIG |
| | | DQYADLFLAAKNLSDAILLSDILRVNTEITKAPLSASMIKRYDEHHQD |
| | | LTLLKALVRQQLPEKYKEIFFDQSKNGYAGYIDGGASQEEFYKFIKPI |
| | | LEKMDGTEELLVKLNREDLLRKQRTFDNGSIPHQIHLGELHAILRRQ |
| | | EDFYPFLKDNREKIEKILTFRIPYYVGPLARGNSRFAWMTRKSEETIT |
| | | PWNFEEVVDKGASAQSFIERMTNFDKNLPNEKVLPKHSLLYEYFTV |
| | | YNELTKVKYVTEGMRKPAFLSGEQKKAIVDLLFKTNRKVTVKQLKE |
| | | DYFKKIECFDSVEISGVEDRFNASLGTYHDLLKIIKDKDFLDNEENED |
| | | ILEDIVLTLTLFEDREMIEERLKTYAHLFDDKVMKQLKRRRYTGWGR |
| | | LSRKLINGIRDKQSGKTILDFLKSDGFANRNFMQLIHDDSLTFKEDIQ |
| | | KAQVSGQGDSLHEHIANLAGSPAIKKGILQTVKVVDELVKVMGRHK |
| | | PENIVIEMARENQTTQKGQKNSRERMKRIEEGIKELGSQILKEHPVE |
| | | NTQLQNEKLYLYYLQNGRDMYVDQELDINRLSDYDVDHIVPQSFLK |
| | | DDSIDNKVLTRSDKNRGKSDNVPSEEVVKKMKNYWRQLLNAKLITQ |
| | | RKFDNLTKAERGGLSELDKAGFIKRQLVETRQITKHVAQILDSRMNT |
| | | KYDENDKLIREVKVITLKSKLVSDFRKDFQFYKVREINNYHHAHDAY |
| | | LNAVVGTALIKKYPKLESEFVYGDYKVYDVRKMIAKSEQEIGKATAK |
| | | YFFYSNIMNFFKTEITLANGEIRKRPLIETNGETGEIVWDKGRDFATV |
| | | RKVLSMPQVNIVKKTEVQTGGFSKESILPKRNSDKLIARKKDWDPK |
| | | KYGGFDSPTVAYSVLVVAKVEKGKSKKLKSVKELLGITIMERSSFEK |
| | | NPIDFLEAKGYKEVKKDLIIKLPKYSLFELENGRKRMLASAGELQKG |
| | | NELALPSKYVNFLYLASHYEKLKGSPGSSGSETPGTSESATPESSG |
| | | SEVEFSHEYWMRHALTLAKRARDEREVPVGAVLVLNNRVIGEGWN |
| | | RAHAEIMALRQGGLVMQNYRLIDATLYVTFEPCVMCAGAMIHSRIG |
| | | RVVFGVRNAKTGAAGSLMDVLHYPGMNHRVEITEGILADECAALLC |
| | | YFFRMPRQEDNEQKQLFVEQHKHYLDEIIEQISEFSKRVILADANLD |
| | | KVLSAYNKHRDKPIREQAENIIHLFTLTNLGAPAAFKYFDTTIDRKRY |
| | | TSTKEVLDATLIHQSITGLYETRIDLSQLGGD |
| 111.1 Cas9 | 1333 | MDKKYSIGLAIGTNSVGWAVITDEYKVPSKKFKVLGNTDRHSIKKNLI |
| TadAins 997 | | GALLFDSGETAEATRLKRTARRRYTRRKNRICYLQEIFSNEMAKVD |
| polypeptide | | DSFFHRLEESFLVEEDKKHERHPIFGNIVDEVAYHEKYPTIYHLRKK |
| sequence | | LVDSTDKADLRLIYLALAHMIKFRGHFLIEGDLNPDNSDVDKLFIQLV |
| | | QTYNQLFEENPINASGVDAKAILSARLSKSRRLENLIAQLPGEKKNG |
| | | LFGNLIALSLGLTPNFKSNFDLAEDAKLQLSKDTYDDDLDNLLAQIG |
| | | DQYADLFLAAKNLSDAILLSDILRVNTEITKAPLSASMIKRYDEHHQD |
| | | LTLLKALVRQQLPEKYKEIFFDQSKNGYAGYIDGGASQEEFYKFIKPI |
| | | LEKMDGTEELLVKLNREDLLRKQRTFDNGSIPHQIHLGELHAILRRQ |
| | | EDFYPFLKDNREKIEKILTFRIPYYVGPLARGNSRFAWMTRKSEETIT |
| | | PWNFEEVVDKGASAQSFIERMTNFDKNLPNEKVLPKHSLLYEYFTV |
| | | YNELTKVKYVTEGMRKPAFLSGEQKKAIVDLLFKTNRKVTVKQLKE |
| | | DYFKKIECFDSVEISGVEDRFNASLGTYHDLLKIIKDKDFLDNEENED |
| | | ILEDIVLTLTLFEDREMIEERLKTYAHLFDDKVMKQLKRRRYTGWGR |
| | | LSRKLINGIRDKQSGKTILDFLKSDGFANRNFMQLIHDDSLTFKEDIQ |
| | | KAQVSGQGDSLHEHIANLAGSPAIKKGILQTVKVVDELVKVMGRHK |
| | | PENIVIEMARENQTTQKGQKNSRERMKRIEEGIKELGSQILKEHPVE |
| | | NTQLQNEKLYLYYLQNGRDMYVDQELDINRLSDYDVDHIVPQSFLK |
| | | DDSIDNKVLTRSDKNRGKSDNVPSEEVVKKMKNYWRQLLNAKLITQ |
| | | RKFDNLTKAERGGLSELDKAGFIKRQLVETRQITKHVAQILDSRMNT |
| | | KYDENDKLIREVKVITLKSKLVSDFRKDFQFYKVREINNYHHAHDAY |
| | | LNAVVGTALSHEYWMRHALTLAKRARDEREVPVGAVLVLNNRVIG |
| | | EGWNRAIGLHDPTAHAEIMALRQGGLVMQNYRLIDATLYVTFEPCV |
| | | MCAGAMIHSRIGRVVFGVRNAKTGAAGSLMDVLHYPGMNHRVEIT |
| | | EGILADECAALLCYFFRMPRQVFNAQKKAQSSTDGSSGSETPGTS |
| | | ESATPESSGIKKYPKLESEFVYGDYKVYDVRKMIAKSEQEIGKATAK |
| | | YFFYSNIMNFFKTEITLANGEIRKRPLIETNGETGEIVWDKGRDFATV |
| | | RKVLSMPQVNIVKKTEVQTGGFSKESILPKRNSDKLIARKKDWDPK |
| | | KYGGFDSPTVAYSVLVVAKVEKGKSKKLKSVKELLGITIMERSSFEK |
| | | NPIDFLEAKGYKEVKKDLIIKLPKYSLFELENGRKRMLASAGELQKG |
| | | NELALPSKYVNFLYLASHYEKLKGSPEDNEQKQLFVEQHKHYLDEII |
| | | EQISEFSKRVILADANLDKVLSAYNKHRDKPIREQAENIIHLFTLTNLG |
| | | APAAFKYFDTTIDRKRYTSTKEVLDATLIHQSITGLYETRIDLSQLGG |
| | | D |
| 111.2 Cas9 | 1334 | MDKKYSIGLAIGTNSVGWAVITDEYKVPSKKFKVLGNTDRHSIKKNLI |
| TadAins 997 | | GALLFDSGETAEATRLKRTARRRYTRRKNRICYLQEIFSNEMAKVD |
| polypeptide | | DSFFHRLEESFLVEEDKKHERHPIFGNIVDEVAYHEKYPTIYHLRKK |
| sequence | | LVDSTDKADLRLIYLALAHMIKFRGHFLIEGDLNPDNSDVDKLFIQLV |
| | | QTYNQLFEENPINASGVDAKAILSARLSKSRRLENLIAQLPGEKKNG |
| | | LFGNLIALSLGLTPNFKSNFDLAEDAKLQLSKDTYDDDLDNLLAQIG |
| | | DQYADLFLAAKNLSDAILLSDILRVNTEITKAPLSASMIKRYDEHHQD |
| | | LTLLKALVRQQLPEKYKEIFFDQSKNGYAGYIDGGASQEEFYKFIKPI |
| | | LEKMDGTEELLVKLNREDLLRKQRTFDNGSIPHQIHLGELHAILRRQ |
| | | EDFYPFLKDNREKIEKILTFRIPYYVGPLARGNSRFAWMTRKSEETIT |
| | | PWNFEEVVDKGASAQSFIERMTNFDKNLPNEKVLPKHSLLYEYFTV |
| | | YNELTKVKYVTEGMRKPAFLSGEQKKAIVDLLFKTNRKVTVKQLKE |
| | | DYFKKIECFDSVEISGVEDRFNASLGTYHDLLKIIKDKDFLDNEENED |
| | | ILEDIVLTLTLFEDREMIEERLKTYAHLFDDKVMKQLKRRRYTGWGR |
| | | LSRKLINGIRDKQSGKTILDFLKSDGFANRNFMQLIHDDSLTFKEDIQ |
| | | KAQVSGQGDSLHEHIANLAGSPAIKKGILQTVKVVDELVKVMGRHK |
| | | PENIVIEMARENQTTQKGQKNSRERMKRIEEGIKELGSQILKEHPVE |
| | | NTQLQNEKLYLYYLQNGRDMYVDQELDINRLSDYDVDHIVPQSFLK |
| | | DDSIDNKVLTRSDKNRGKSDNVPSEEVVKKMKNYWRQLLNAKLITQ |
| | | RKFDNLTKAERGGLSELDKAGFIKRQLVETRQITKHVAQILDSRMNT |
| | | KYDENDKLIREVKVITLKSKLVSDFRKDFQFYKVREINNYHHAHDAY |
| | | LNAVVGTALSHEYWMRHALTLAKRARDEREVPVGAVLVLNNRVIG |
| | | EGWNRAIGLHDPTAHAEIMALRQGGLVMQNYRLIDATLYVTFEPCV |
| | | MCAGAMIHSRIGRVVFGVRNAKTGAAGSLMDVLHYPGMNHRVEIT |
| | | EGILADECAALLCYFFRMPRQVFNAQKKAQSSTDGSSGSSGSETP |
| | | GTSESATPESSGGSSIKKYPKLESEFVYGDYKVYDVRKMIAKSEQEI |
| | | GKATAKYFFYSNIMNFFKTEITLANGEIRKRPLIETNGETGEIVWDKG |
| | | RDFATVRKVLSMPQVNIVKKTEVQTGGFSKESILPKRNSDKLIARKK |
| | | DWDPKKYGGFDSPTVAYSVLVVAKVEKGKSKKLKSVKELLGITIME |
| | | RSSFEKNPIDFLEAKGYKEVKKDLIIKLPKYSLFELENGRKRMLASA |
| | | GELQKGNELALPSKYVNFLYLASHYEKLKGSPEDNEQKQLFVEQH |
| | | KHYLDEIIEQISEFSKRVILADANLDKVLSAYNKHRDKPIREQAENIIH |
| | | LFTLTNLGAPAAFKYFDTTIDRKRYTSTKEVLDATLIHQSITGLYETRI |
| | | DLSQLGGD |
| 112 delta HNH | 1335 | MDKKYSIGLAIGTNSVGWAVITDEYKVPSKKFKVLGNTDRHSIKKNLI |
| TadA polypeptide | | GALLFDSGETAEATRLKRTARRRYTRRKNRICYLQEIFSNEMAKVD |
| sequence | | DSFFHRLEESFLVEEDKKHERHPIFGNIVDEVAYHEKYPTIYHLRKK |
| | | LVDSTDKADLRLIYLALAHMIKFRGHFLIEGDLNPDNSDVDKLFIQLV |
| | | QTYNQLFEENPINASGVDAKAILSARLSKSRRLENLIAQLPGEKKNG |
| | | LFGNLIALSLGLTPNFKSNFDLAEDAKLQLSKDTYDDDLDNLLAQIG |
| | | DQYADLFLAAKNLSDAILLSDILRVNTEITKAPLSASMIKRYDEHHQD |
| | | LTLLKALVRQQLPEKYKEIFFDQSKNGYAGYIDGGASQEEFYKFIKPI |
| | | LEKMDGTEELLVKLNREDLLRKQRTFDNGSIPHQIHLGELHAILRRQ |
| | | EDFYPFLKDNREKIEKILTFRIPYYVGPLARGNSRFAWMTRKSEETIT |
| | | PWNFEEVVDKGASAQSFIERMTNFDKNLPNEKVLPKHSLLYEYFTV |
| | | YNELTKVKYVTEGMRKPAFLSGEQKKAIVDLLFKTNRKVTVKQLKE |
| | | DYFKKIECFDSVEISGVEDRFNASLGTYHDLLKIIKDKDFLDNEENED |
| | | ILEDIVLTLTLFEDREMIEERLKTYAHLFDDKVMKQLKRRRYTGWGR |
| | | LSRKLINGIRDKQSGKTILDFLKSDGFANRNFMQLIHDDSLTFKEDIQ |
| | | KAQVSGQGDSLHEHIANLAGSPAIKKGILQTVKVVDELVKVMGRHK |
| | | PENIVIEMARENQTTQKGQKNSRERMKRIEEGIKELGSEVEFSHEY |
| | | WMRHALTLAKRARDEREVPVGAVLVLNNRVIGEGWNRAIGLHDPT |
| | | AHAEIMALRQGGLVMQNYRLIDATLYVTFEPCVMCAGAMIHSRIGR |
| | | VVFGVRNAKTGAAGSLMDVLHYPGMNHRVEITEGILADECAALLCY |
| | | FFRMPRQVFNAQKKAQSSTDGGLSELDKAGFIKRQLVETRQITKHV |
| | | AQILDSRMNTKYDENDKLIREVKVITLKSKLVSDFRKDFQFYKVREIN |
| | | NYHHAHDAYLNAVVGTALIKKYPKLESEFVYGDYKVYDVRKMIAKS |
| | | EQEIGKATAKYFFYSNIMNFFKTEITLANGEIRKRPLIETNGETGEIV |
| | | WDKGRDFATVRKVLSMPQVNIVKKTEVQTGGFSKESILPKRNSDKL |
| | | IARKKDWDPKKYGGFDSPTVAYSVLVVAKVEKGKSKKLKSVKELLG |
| | | ITIMERSSFEKNPIDFLEAKGYKEVKKDLIIKLPKYSLFELENGRKRML |
| | | ASAGELQKGNELALPSKYVNFLYLASHYEKLKGSPEDNEQKQLFVE |
| | | QHKHYLDEIIEQISEFSKRVILADANLDKVLSAYNKHRDKPIREQAEN |
| | | IIHLFTLTNLGAPAAFKYFDTTIDRKRYTSTKEVLDATLIHQSITGLYET |
| | | RIDLSQLGGD |
| 113 N-term single | 1336 | MSEVEFSHEYWMRHALTLAKRARDEREVPVGAVLVLNNRVIGEGW |
| TadA helix trunc | | NRAIGLHDPTAHAEIMALRQGGLVMQNYRLIDATLYVTFEPCVMCA |
| 165-end | | GAMIHSRIGRVVFGVRNAKTGAAGSLMDVLHYPGMNHRVEITEGIL |
| polypeptide | | ADECAALLCYFFRMPRSGGSSGGSSGSETPGTSESATPESSGGSS |
| sequence | | GGSDKKYSIGLAIGTNSVGWAVITDEYKVPSKKFKVLGNTDRHSIKK |
| | | NLIGALLFDSGETAEATRLKRTARRRYTRRKNRICYLQEIFSNEMAK |
| | | VDDSFFHRLEESFLVEEDKKHERHPIFGNIVDEVAYHEKYPTIYHLR |
| | | KKLVDSTDKADLRLIYLALAHMIKFRGHFLIEGDLNPDNSDVDKLFIQ |
| | | LVQTYNQLFEENPINASGVDAKAILSARLSKSRRLENLIAQLPGEKK |
| | | NGLFGNLIALSLGLTPNFKSNFDLAEDAKLQLSKDTYDDDLDNLLAQ |
| | | IGDQYADLFLAAKNLSDAILLSDILRVNTEITKAPLSASMIKRYDEHH |
| | | QDLTLLKALVRQQLPEKYKEIFFDQSKNGYAGYIDGGASQEEFYKFI |
| | | KPILEKMDGTEELLVKLNREDLLRKQRTFDNGSIPHQIHLGELHAILR |
| | | RQEDFYPFLKDNREKIEKILTFRIPYYVGPLARGNSRFAWMTRKSEE |
| | | TITPWNFEEVVDKGASAQSFIERMTNFDKNLPNEKVLPKHSLLYEYF |
| | | TVYNELTKVKYVTEGMRKPAFLSGEQKKAIVDLLFKTNRKVTVKQL |
| | | KEDYFKKIECFDSVEISGVEDRFNASLGTYHDLLKIIKDKDFLDNEEN |
| | | EDILEDIVLTLTLFEDREMIEERLKTYAHLFDDKVMKQLKRRRYTGW |
| | | GRLSRKLINGIRDKQSGKTILDFLKSDGFANRNFMQLIHDDSLTFKE |
| | | DIQKAQVSGQGDSLHEHIANLAGSPAIKKGILQTVKVVDELVKVMGR |
| | | HKPENIVIEMARENQTTQKGQKNSRERMKRIEEGIKELGSQILKEHP |
| | | VENTQLQNEKLYLYYLQNGRDMYVDQELDINRLSDYDVDHIVPQSF |
| | | LKDDSIDNKVLTRSDKNRGKSDNVPSEEVVKKMKNYWRQLLNAKLI |
| | | TQRKFDNLTKAERGGLSELDKAGFIKRQLVETRQITKHVAQILDSRM |
| | | NTKYDENDKLIREVKVITLKSKLVSDFRKDFQFYKVREINNYHHAHD |
| | | AYLNAVVGTALIKKYPKLESEFVYGDYKVYDVRKMIAKSEQEIGKAT |
| | | AKYFFYSNIMNFFKTEITLANGEIRKRPLIETNGETGEIVWDKGRDFA |
| | | TVRKVLSMPQVNIVKKTEVQTGGFSKESILPKRNSDKLIARKKDWD |
| | | PKKYGGFDSPTVAYSVLVVAKVEKGKSKKLKSVKELLGITIMERSSF |
| | | EKNPIDFLEAKGYKEVKKDLIIKLPKYSLFELENGRKRMLASAGELQ |
| | | KGNELALPSKYVNFLYLASHYEKLKGSPEDNEQKQLFVEQHKHYLD |
| | | EIIEQISEFSKRVILADANLDKVLSAYNKHRDKPIREQAENIIHLFTLTN |
| | | LGAPAAFKYFDTTIDRKRYTSTKEVLDATLIHQSITGLYETRIDLSQL |
| | | GGD |
| 114 N-term single | 1337 | MSEVEFSHEYWMRHALTLAKRARDEREVPVGAVLVLNNRVIGEGW |
| TadA helix trunc | | NRTAHAEIMALRQGGLVMQNYRLIDATLYVTFEPCVMCAGAMIHSR |
| 165-end delta | | IGRVVFGVRNAKTGAAGSLMDVLHYPGMNHRVEITEGILADECAAL |
| 59-65 polypeptide | | LCYFFRMPRSGGSSGGSSGSETPGTSESATPESSGGSSGGSDKK |
| sequence | | YSIGLAIGTNSVGWAVITDEYKVPSKKFKVLGNTDRHSIKKNLIGALL |
| | | FDSGETAEATRLKRTARRRYTRRKNRICYLQEIFSNEMAKVDDSFF |
| | | HRLEESFLVEEDKKHERHPIFGNIVDEVAYHEKYPTIYHLRKKLVDS |
| | | TDKADLRLIYLALAHMIKFRGHFLIEGDLNPDNSDVDKLFIQLVQTYN |
| | | QLFEENPINASGVDAKAILSARLSKSRRLENLIAQLPGEKKNGLFGN |
| | | LIALSLGLTPNFKSNFDLAEDAKLQLSKDTYDDDLDNLLAQIGDQYA |
| | | DLFLAAKNLSDAILLSDILRVNTEITKAPLSASMIKRYDEHHQDLTLLK |
| | | ALVRQQLPEKYKEIFFDQSKNGYAGYIDGGASQEEFYKFIKPILEKM |
| | | DGTEELLVKLNREDLLRKQRTFDNGSIPHQIHLGELHAILRRQEDFY |
| | | PFLKDNREKIEKILTFRIPYYVGPLARGNSRFAWMTRKSEETITPWN |
| | | FEEVVDKGASAQSFIERMTNFDKNLPNEKVLPKHSLLYEYFTVYNE |
| | | LTKVKYVTEGMRKPAFLSGEQKKAIVDLLFKTNRKVTVKQLKEDYF |
| | | KKIECFDSVEISGVEDRFNASLGTYHDLLKIIKDKDFLDNEENEDILE |
| | | DIVLTLTLFEDREMIEERLKTYAHLFDDKVMKQLKRRRYTGWGRLS |
| | | RKLINGIRDKQSGKTILDFLKSDGFANRNFMQLIHDDSLTFKEDIQKA |
| | | QVSGQGDSLHEHIANLAGSPAIKKGILQTVKVVDELVKVMGRHKPE |
| | | NIVIEMARENQTTQKGQKNSRERMKRIEEGIKELGSQILKEHPVENT |
| | | QLQNEKLYLYYLQNGRDMYVDQELDINRLSDYDVDHIVPQSFLKDD |
| | | SIDNKVLTRSDKNRGKSDNVPSEEVVKKMKNYWRQLLNAKLITQRK |
| | | FDNLTKAERGGLSELDKAGFIKRQLVETRQITKHVAQILDSRMNTKY |
| | | DENDKLIREVKVITLKSKLVSDFRKDFQFYKVREINNYHHAHDAYLN |
| | | AVVGTALIKKYPKLESEFVYGDYKVYDVRKMIAKSEQEIGKATAKYF |
| | | FYSNIMNFFKTEITLANGEIRKRPLIETNGETGEIVWDKGRDFATVRK |
| | | VLSMPQVNIVKKTEVQTGGFSKESILPKRNSDKLIARKKDWDPKKY |
| | | GGFDSPTVAYSVLVVAKVEKGKSKKLKSVKELLGITIMERSSFEKNP |
| | | IDFLEAKGYKEVKKDLIIKLPKYSLFELENGRKRMLASAGELQKGNE |
| | | LALPSKYVNFLYLASHYEKLKGSPEDNEQKQLFVEQHKHYLDEIIEQ |
| | | ISEFSKRVILADANLDKVLSAYNKHRDKPIREQAENIIHLFTLTNLGAP |
| | | AAFKYFDTTIDRKRYTSTKEVLDATLIHQSITGLYETRIDLSQLGGD |
| 115.1 Cas9 | 1338 | MDKKYSIGLAIGTNSVGWAVITDEYKVPSKKFKVLGNTDRHSIKKNLI |
| TadAins1004 | | GALLFDSGETAEATRLKRTARRRYTRRKNRICYLQEIFSNEMAKVD |
| polypeptide | | DSFFHRLEESFLVEEDKKHERHPIFGNIVDEVAYHEKYPTIYHLRKK |
| sequence | | LVDSTDKADLRLIYLALAHMIKFRGHFLIEGDLNPDNSDVDKLFIQLV |
| | | QTYNQLFEENPINASGVDAKAILSARLSKSRRLENLIAQLPGEKKNG |
| | | LFGNLIALSLGLTPNFKSNFDLAEDAKLQLSKDTYDDDLDNLLAQIG |
| | | DQYADLFLAAKNLSDAILLSDILRVNTEITKAPLSASMIKRYDEHHQD |
| | | LTLLKALVRQQLPEKYKEIFFDQSKNGYAGYIDGGASQEEFYKFIKPI |
| | | LEKMDGTEELLVKLNREDLLRKQRTFDNGSIPHQIHLGELHAILRRQ |
| | | EDFYPFLKDNREKIEKILTFRIPYYVGPLARGNSRFAWMTRKSEETIT |
| | | PWNFEEVVDKGASAQSFIERMTNFDKNLPNEKVLPKHSLLYEYFTV |
| | | YNELTKVKYVTEGMRKPAFLSGEQKKAIVDLLFKTNRKVTVKQLKE |
| | | DYFKKIECFDSVEISGVEDRFNASLGTYHDLLKIIKDKDFLDNEENED |
| | | ILEDIVLTLTLFEDREMIEERLKTYAHLFDDKVMKQLKRRRYTGWGR |
| | | LSRKLINGIRDKQSGKTILDFLKSDGFANRNFMQLIHDDSLTFKEDIQ |
| | | KAQVSGQGDSLHEHIANLAGSPAIKKGILQTVKVVDELVKVMGRHK |
| | | PENIVIEMARENQTTQKGQKNSRERMKRIEEGIKELGSQILKEHPVE |
| | | NTQLQNEKLYLYYLQNGRDMYVDQELDINRLSDYDVDHIVPQSFLK |
| | | DDSIDNKVLTRSDKNRGKSDNVPSEEVVKKMKNYWRQLLNAKLITQ |
| | | RKFDNLTKAERGGLSELDKAGFIKRQLVETRQITKHVAQILDSRMNT |
| | | KYDENDKLIREVKVITLKSKLVSDFRKDFQFYKVREINNYHHAHDAY |
| | | LNAVVGTALIKKYPKGSSGSETPGTSESATPESSGSEVEFSHEYW |
| | | MRHALTLAKRARDEREVPVGAVLVLNNRVIGEGWNRAIGLHDPTA |
| | | HAEIMALRQGGLVMQNYRLIDATLYVTFEPCVMCAGAMIHSRIGRV |
| | | VFGVRNAKTGAAGSLMDVLHYPGMNHRVEITEGILADECAALLCYF |
| | | FRMPRQLESEFVYGDYKVYDVRKMIAKSEQEIGKATAKYFFYSNIM |
| | | NFFKTEITLANGEIRKRPLIETNGETGEIVWDKGRDFATVRKVLSMP |
| | | QVNIVKKTEVQTGGFSKESILPKRNSDKLIARKKDWDPKKYGGFDS |
| | | PTVAYSVLVVAKVEKGKSKKLKSVKELLGITIMERSSFEKNPIDFLEA |
| | | KGYKEVKKDLIIKLPKYSLFELENGRKRMLASAGELQKGNELALPSK |
| | | YVNFLYLASHYEKLKGSPEDNEQKQLFVEQHKHYLDEIIEQISEFSK |
| | | RVILADANLDKVLSAYNKHRDKPIREQAENIIHLFTLTNLGAPAAFKY |
| | | FDTTIDRKRYTSTKEVLDATLIHQSITGLYETRIDLSQLGGD |
| 115.2 Cas9 | 1339 | MDKKYSIGLAIGTNSVGWAVITDEYKVPSKKFKVLGNTDRHSIKKNLI |
| TadAins1005 | | GALLFDSGETAEATRLKRTARRRYTRRKNRICYLQEIFSNEMAKVD |
| polypeptide | | DSFFHRLEESFLVEEDKKHERHPIFGNIVDEVAYHEKYPTIYHLRKK |
| sequence | | LVDSTDKADLRLIYLALAHMIKFRGHFLIEGDLNPDNSDVDKLFIQLV |
| | | QTYNQLFEENPINASGVDAKAILSARLSKSRRLENLIAQLPGEKKNG |
| | | LFGNLIALSLGLTPNFKSNFDLAEDAKLQLSKDTYDDDLDNLLAQIG |
| | | DQYADLFLAAKNLSDAILLSDILRVNTEITKAPLSASMIKRYDEHHQD |
| | | LTLLKALVRQQLPEKYKEIFFDQSKNGYAGYIDGGASQEEFYKFIKPI |
| | | LEKMDGTEELLVKLNREDLLRKQRTFDNGSIPHQIHLGELHAILRRQ |
| | | EDFYPFLKDNREKIEKILTFRIPYYVGPLARGNSRFAWMTRKSEETIT |
| | | PWNFEEVVDKGASAQSFIERMTNFDKNLPNEKVLPKHSLLYEYFTV |
| | | YNELTKVKYVTEGMRKPAFLSGEQKKAIVDLLFKTNRKVTVKQLKE |
| | | DYFKKIECFDSVEISGVEDRFNASLGTYHDLLKIIKDKDFLDNEENED |
| | | ILEDIVLTLTLFEDREMIEERLKTYAHLFDDKVMKQLKRRRYTGWGR |
| | | LSRKLINGIRDKQSGKTILDFLKSDGFANRNFMQLIHDDSLTFKEDIQ |
| | | KAQVSGQGDSLHEHIANLAGSPAIKKGILQTVKVVDELVKVMGRHK |
| | | PENIVIEMARENQTTQKGQKNSRERMKRIEEGIKELGSQILKEHPVE |
| | | NTQLQNEKLYLYYLQNGRDMYVDQELDINRLSDYDVDHIVPQSFLK |
| | | DDSIDNKVLTRSDKNRGKSDNVPSEEVVKKMKNYWRQLLNAKLITQ |
| | | RKFDNLTKAERGGLSELDKAGFIKRQLVETRQITKHVAQILDSRMNT |
| | | KYDENDKLIREVKVITLKSKLVSDFRKDFQFYKVREINNYHHAHDAY |
| | | LNAVVGTALIKKYPKLGSSGSETPGTSESATPESSGSEVEFSHEYW |
| | | MRHALTLAKRARDEREVPVGAVLVLNNRVIGEGWNRAIGLHDPTA |
| | | HAEIMALRQGGLVMQNYRLIDATLYVTFEPCVMCAGAMIHSRIGRV |
| | | VFGVRNAKTGAAGSLMDVLHYPGMNHRVEITEGILADECAALLCYF |
| | | FRMPRQESEFVYGDYKVYDVRKMIAKSEQEIGKATAKYFFYSNIMN |
| | | FFKTEITLANGEIRKRPLIETNGETGEIVWDKGRDFATVRKVLSMPQ |
| | | VNIVKKTEVQTGGFSKESILPKRNSDKLIARKKDWDPKKYGGFDSP |
| | | TVAYSVLVVAKVEKGKSKKLKSVKELLGITIMERSSFEKNPIDFLEAK |
| | | GYKEVKKDLIIKLPKYSLFELENGRKRMLASAGELQKGNELALPSKY |
| | | VNFLYLASHYEKLKGSPEDNEQKQLFVEQHKHYLDEIIEQISEFSKR |
| | | VILADANLDKVLSAYNKHRDKPIREQAENIIHLFTLTNLGAPAAFKYF |
| | | DTTIDRKRYTSTKEVLDATLIHQSITGLYETRIDLSQLGGD |
| 115.3 Cas9 | 1340 | MDKKYSIGLAIGTNSVGWAVITDEYKVPSKKFKVLGNTDRHSIKKNLI |
| TadAins1006 | | GALLFDSGETAEATRLKRTARRRYTRRKNRICYLQEIFSNEMAKVD |
| polypeptide | | DSFFHRLEESFLVEEDKKHERHPIFGNIVDEVAYHEKYPTIYHLRKK |
| sequence | | LVDSTDKADLRLIYLALAHMIKFRGHFLIEGDLNPDNSDVDKLFIQLV |
| | | QTYNQLFEENPINASGVDAKAILSARLSKSRRLENLIAQLPGEKKNG |
| | | LFGNLIALSLGLTPNFKSNFDLAEDAKLQLSKDTYDDDLDNLLAQIG |
| | | DQYADLFLAAKNLSDAILLSDILRVNTEITKAPLSASMIKRYDEHHQD |
| | | LTLLKALVRQQLPEKYKEIFFDQSKNGYAGYIDGGASQEEFYKFIKPI |
| | | LEKMDGTEELLVKLNREDLLRKQRTFDNGSIPHQIHLGELHAILRRQ |
| | | EDFYPFLKDNREKIEKILTFRIPYYVGPLARGNSRFAWMTRKSEETIT |
| | | PWNFEEVVDKGASAQSFIERMTNFDKNLPNEKVLPKHSLLYEYFTV |
| | | YNELTKVKYVTEGMRKPAFLSGEQKKAIVDLLFKTNRKVTVKQLKE |
| | | DYFKKIECFDSVEISGVEDRFNASLGTYHDLLKIIKDKDFLDNEENED |
| | | ILEDIVLTLTLFEDREMIEERLKTYAHLFDDKVMKQLKRRRYTGWGR |
| | | LSRKLINGIRDKQSGKTILDFLKSDGFANRNFMQLIHDDSLTFKEDIQ |
| | | KAQVSGQGDSLHEHIANLAGSPAIKKGILQTVKVVDELVKVMGRHK |
| | | PENIVIEMARENQTTQKGQKNSRERMKRIEEGIKELGSQILKEHPVE |
| | | NTQLQNEKLYLYYLQNGRDMYVDQELDINRLSDYDVDHIVPQSFLK |
| | | DDSIDNKVLTRSDKNRGKSDNVPSEEVVKKMKNYWRQLLNAKLITQ |
| | | RKFDNLTKAERGGLSELDKAGFIKRQLVETRQITKHVAQILDSRMNT |
| | | KYDENDKLIREVKVITLKSKLVSDFRKDFQFYKVREINNYHHAHDAY |
| | | LNAVVGTALIKKYPKLEGSSGSETPGTSESATPESSGSEVEFSHEY |
| | | WMRHALTLAKRARDEREVPVGAVLVLNNRVIGEGWNRAIGLHDPT |
| | | AHAEIMALRQGGLVMQNYRLIDATLYVTFEPCVMCAGAMIHSRIGR |
| | | VVFGVRNAKTGAAGSLMDVLHYPGMNHRVEITEGILADECAALLCY |
| | | FFRMPRQSEFVYGDYKVYDVRKMIAKSEQEIGKATAKYFFYSNIMN |
| | | FFKTEITLANGEIRKRPLIETNGETGEIVWDKGRDFATVRKVLSMPQ |
| | | VNIVKKTEVQTGGFSKESILPKRNSDKLIARKKDWDPKKYGGFDSP |
| | | TVAYSVLVVAKVEKGKSKKLKSVKELLGITIMERSSFEKNPIDFLEAK |
| | | GYKEVKKDLIIKLPKYSLFELENGRKRMLASAGELQKGNELALPSKY |
| | | VNFLYLASHYEKLKGSPEDNEQKQLFVEQHKHYLDEIIEQISEFSKR |
| | | VILADANLDKVLSAYNKHRDKPIREQAENIIHLFTLTNLGAPAAFKYF |
| | | DTTIDRKRYTSTKEVLDATLIHQSITGLYETRIDLSQLGGD |
| 115.4 Cas9 | 1341 | MDKKYSIGLAIGTNSVGWAVITDEYKVPSKKFKVLGNTDRHSIKKNLI |
| TadAins1007 | | GALLFDSGETAEATRLKRTARRRYTRRKNRICYLQEIFSNEMAKVD |
| polypeptide | | DSFFHRLEESFLVEEDKKHERHPIFGNIVDEVAYHEKYPTIYHLRKK |
| sequence | | LVDSTDKADLRLIYLALAHMIKFRGHFLIEGDLNPDNSDVDKLFIQLV |
| | | QTYNQLFEENPINASGVDAKAILSARLSKSRRLENLIAQLPGEKKNG |
| | | LFGNLIALSLGLTPNFKSNFDLAEDAKLQLSKDTYDDDLDNLLAQIG |
| | | DQYADLFLAAKNLSDAILLSDILRVNTEITKAPLSASMIKRYDEHHQD |
| | | LTLLKALVRQQLPEKYKEIFFDQSKNGYAGYIDGGASQEEFYKFIKPI |
| | | LEKMDGTEELLVKLNREDLLRKQRTFDNGSIPHQIHLGELHAILRRQ |
| | | EDFYPFLKDNREKIEKILTFRIPYYVGPLARGNSRFAWMTRKSEETIT |
| | | PWNFEEVVDKGASAQSFIERMTNFDKNLPNEKVLPKHSLLYEYFTV |
| | | YNELTKVKYVTEGMRKPAFLSGEQKKAIVDLLFKTNRKVTVKQLKE |
| | | DYFKKIECFDSVEISGVEDRFNASLGTYHDLLKIIKDKDFLDNEENED |
| | | ILEDIVLTLTLFEDREMIEERLKTYAHLFDDKVMKQLKRRRYTGWGR |
| | | LSRKLINGIRDKQSGKTILDFLKSDGFANRNFMQLIHDDSLTFKEDIQ |
| | | KAQVSGQGDSLHEHIANLAGSPAIKKGILQTVKVVDELVKVMGRHK |
| | | PENIVIEMARENQTTQKGQKNSRERMKRIEEGIKELGSQILKEHPVE |
| | | NTQLQNEKLYLYYLQNGRDMYVDQELDINRLSDYDVDHIVPQSFLK |
| | | DDSIDNKVLTRSDKNRGKSDNVPSEEVVKKMKNYWRQLLNAKLITQ |
| | | RKFDNLTKAERGGLSELDKAGFIKRQLVETRQITKHVAQILDSRMNT |
| | | KYDENDKLIREVKVITLKSKLVSDFRKDFQFYKVREINNYHHAHDAY |
| | | LNAVVGTALIKKYPKLESGSSGSETPGTSESATPESSGSEVEFSHE |
| | | YWMRHALTLAKRARDEREVPVGAVLVLNNRVIGEGWNRAIGLHDP |
| | | TAHAEIMALRQGGLVMQNYRLIDATLYVTFEPCVMCAGAMIHSRIG |
| | | RVVFGVRNAKTGAAGSLMDVLHYPGMNHRVEITEGILADECAALLC |
| | | YFFRMPRQEFVYGDYKVYDVRKMIAKSEQEIGKATAKYFFYSNIMN |
| | | FFKTEITLANGEIRKRPLIETNGETGEIVWDKGRDFATVRKVLSMPQ |
| | | VNIVKKTEVQTGGFSKESILPKRNSDKLIARKKDWDPKKYGGFDSP |
| | | TVAYSVLVVAKVEKGKSKKLKSVKELLGITIMERSSFEKNPIDFLEAK |
| | | GYKEVKKDLIIKLPKYSLFELENGRKRMLASAGELQKGNELALPSKY |
| | | VNFLYLASHYEKLKGSPEDNEQKQLFVEQHKHYLDEIIEQISEFSKR |
| | | VILADANLDKVLSAYNKHRDKPIREQAENIIHLFTLTNLGAPAAFKYF |
| | | DTTIDRKRYTSTKEVLDATLIHQSITGLYETRIDLSQLGGD |
| 116.1 Cas9 | 1342 | MDKKYSIGLAIGTNSVGWAVITDEYKVPSKKFKVLGNTDRHSIKKNLI |
| TadAins C-term | | GALLFDSGETAEATRLKRTARRRYTRRKNRICYLQEIFSNEMAKVD |
| truncate2 792 | | DSFFHRLEESFLVEEDKKHERHPIFGNIVDEVAYHEKYPTIYHLRKK |
| polypeptide | | LVDSTDKADLRLIYLALAHMIKFRGHFLIEGDLNPDNSDVDKLFIQLV |
| sequence | | QTYNQLFEENPINASGVDAKAILSARLSKSRRLENLIAQLPGEKKNG |
| | | LFGNLIALSLGLTPNFKSNFDLAEDAKLQLSKDTYDDDLDNLLAQIG |
| | | DQYADLFLAAKNLSDAILLSDILRVNTEITKAPLSASMIKRYDEHHQD |
| | | LTLLKALVRQQLPEKYKEIFFDQSKNGYAGYIDGGASQEEFYKFIKPI |
| | | LEKMDGTEELLVKLNREDLLRKQRTFDNGSIPHQIHLGELHAILRRQ |
| | | EDFYPFLKDNREKIEKILTFRIPYYVGPLARGNSRFAWMTRKSEETIT |
| | | PWNFEEVVDKGASAQSFIERMTNFDKNLPNEKVLPKHSLLYEYFTV |
| | | YNELTKVKYVTEGMRKPAFLSGEQKKAIVDLLFKTNRKVTVKQLKE |
| | | DYFKKIECFDSVEISGVEDRFNASLGTYHDLLKIIKDKDFLDNEENED |
| | | ILEDIVLTLTLFEDREMIEERLKTYAHLFDDKVMKQLKRRRYTGWGR |
| | | LSRKLINGIRDKQSGKTILDFLKSDGFANRNFMQLIHDDSLTFKEDIQ |
| | | KAQVSGQGDSLHEHIANLAGSPAIKKGILQTVKVVDELVKVMGRHK |
| | | PENIVIEMARENQTTQKGQKNSRERMKRIEEGIKELGGSSGSETPG |
| | | TSESATPESSGSEVEFSHEYWMRHALTLAKRARDEREVPVGAVLV |
| | | LNNRVIGEGWNRAIGLHDPTAHAEIMALRQGGLVMQNYRLIDATLY |
| | | VTFEPCVMCAGAMIHSRIGRVVFGVRNAKTGAAGSLMDVLHYPGM |
| | | NHRVEITEGILADECAALLCYFFRMPRQSQILKEHPVENTQLQNEKL |
| | | YLYYLQNGRDMYVDQELDINRLSDYDVDHIVPQSFLKDDSIDNKVLT |
| | | RSDKNRGKSDNVPSEEVVKKMKNYWRQLLNAKLITQRKFDNLTKA |
| | | ERGGLSELDKAGFIKRQLVETRQITKHVAQILDSRMNTKYDENDKLI |
| | | REVKVITLKSKLVSDFRKDFQFYKVREINNYHHAHDAYLNAVVGTAL |
| | | IKKYPKLESEFVYGDYKVYDVRKMIAKSEQEIGKATAKYFFYSNIMN |
| | | FFKTEITLANGEIRKRPLIETNGETGEIVWDKGRDFATVRKVLSMPQ |
| | | VNIVKKTEVQTGGFSKESILPKRNSDKLIARKKDWDPKKYGGFDSP |
| | | TVAYSVLVVAKVEKGKSKKLKSVKELLGITIMERSSFEKNPIDFLEAK |
| | | GYKEVKKDLIIKLPKYSLFELENGRKRMLASAGELQKGNELALPSKY |
| | | VNFLYLASHYEKLKGSPEDNEQKQLFVEQHKHYLDEIIEQISEFSKR |
| | | VILADANLDKVLSAYNKHRDKPIREQAENIIHLFTLTNLGAPAAFKYF |
| | | DTTIDRKRYTSTKEVLDATLIHQSITGLYETRIDLSQLGGD |
| 116.2 Cas9 | 1343 | MDKKYSIGLAIGTNSVGWAVITDEYKVPSKKFKVLGNTDRHSIKKNLI |
| TadAins C-term | | GALLFDSGETAEATRLKRTARRRYTRRKNRICYLQEIFSNEMAKVD |
| truncate2 791 | | DSFFHRLEESFLVEEDKKHERHPIFGNIVDEVAYHEKYPTIYHLRKK |
| polypeptide | | LVDSTDKADLRLIYLALAHMIKFRGHFLIEGDLNPDNSDVDKLFIQLV |
| sequence | | QTYNQLFEENPINASGVDAKAILSARLSKSRRLENLIAQLPGEKKNG |
| | | LFGNLIALSLGLTPNFKSNFDLAEDAKLQLSKDTYDDDLDNLLAQIG |
| | | DQYADLFLAAKNLSDAILLSDILRVNTEITKAPLSASMIKRYDEHHQD |
| | | LTLLKALVRQQLPEKYKEIFFDQSKNGYAGYIDGGASQEEFYKFIKPI |
| | | LEKMDGTEELLVKLNREDLLRKQRTFDNGSIPHQIHLGELHAILRRQ |
| | | EDFYPFLKDNREKIEKILTFRIPYYVGPLARGNSRFAWMTRKSEETIT |
| | | PWNFEEVVDKGASAQSFIERMTNFDKNLPNEKVLPKHSLLYEYFTV |
| | | YNELTKVKYVTEGMRKPAFLSGEQKKAIVDLLFKTNRKVTVKQLKE |
| | | DYFKKIECFDSVEISGVEDRFNASLGTYHDLLKIIKDKDFLDNEENED |
| | | ILEDIVLTLTLFEDREMIEERLKTYAHLFDDKVMKQLKRRRYTGWGR |
| | | LSRKLINGIRDKQSGKTILDFLKSDGFANRNFMQLIHDDSLTFKEDIQ |
| | | KAQVSGQGDSLHEHIANLAGSPAIKKGILQTVKVVDELVKVMGRHK |
| | | PENIVIEMARENQTTQKGQKNSRERMKRIEEGIKELGSSGSETPGT |
| | | SESATPESSGSEVEFSHEYWMRHALTLAKRARDEREVPVGAVLVL |
| | | NNRVIGEGWNRAIGLHDPTAHAEIMALRQGGLVMQNYRLIDATLYV |
| | | TFEPCVMCAGAMIHSRIGRVVFGVRNAKTGAAGSLMDVLHYPGMN |
| | | HRVEITEGILADECAALLCYFFRMPRQGSQILKEHPVENTQLQNEKL |
| | | YLYYLQNGRDMYVDQELDINRLSDYDVDHIVPQSFLKDDSIDNKVLT |
| | | RSDKNRGKSDNVPSEEVVKKMKNYWRQLLNAKLITQRKFDNLTKA |
| | | ERGGLSELDKAGFIKRQLVETRQITKHVAQILDSRMNTKYDENDKLI |
| | | REVKVITLKSKLVSDFRKDFQFYKVREINNYHHAHDAYLNAVVGTAL |
| | | IKKYPKLESEFVYGDYKVYDVRKMIAKSEQEIGKATAKYFFYSNIMN |
| | | FFKTEITLANGEIRKRPLIETNGETGEIVWDKGRDFATVRKVLSMPQ |
| | | VNIVKKTEVQTGGFSKESILPKRNSDKLIARKKDWDPKKYGGFDSP |
| | | TVAYSVLVVAKVEKGKSKKLKSVKELLGITIMERSSFEKNPIDFLEAK |
| | | GYKEVKKDLIIKLPKYSLFELENGRKRMLASAGELQKGNELALPSKY |
| | | VNFLYLASHYEKLKGSPEDNEQKQLFVEQHKHYLDEIIEQISEFSKR |
| | | VILADANLDKVLSAYNKHRDKPIREQAENIIHLFTLTNLGAPAAFKYF |
| | | DTTIDRKRYTSTKEVLDATLIHQSITGLYETRIDLSQLGGD |
| 116.3 Cas9 | 1344 | MDKKYSIGLAIGTNSVGWAVITDEYKVPSKKFKVLGNTDRHSIKKNLI |
| TadAins C-term | | GALLFDSGETAEATRLKRTARRRYTRRKNRICYLQEIFSNEMAKVD |
| truncate2 790 | | DSFFHRLEESFLVEEDKKHERHPIFGNIVDEVAYHEKYPTIYHLRKK |
| polypeptide | | LVDSTDKADLRLIYLALAHMIKFRGHFLIEGDLNPDNSDVDKLFIQLV |
| sequence | | QTYNQLFEENPINASGVDAKAILSARLSKSRRLENLIAQLPGEKKNG |
| | | LFGNLIALSLGLTPNFKSNFDLAEDAKLQLSKDTYDDDLDNLLAQIG |
| | | DQYADLFLAAKNLSDAILLSDILRVNTEITKAPLSASMIKRYDEHHQD |
| | | LTLLKALVRQQLPEKYKEIFFDQSKNGYAGYIDGGASQEEFYKFIKPI |
| | | LEKMDGTEELLVKLNREDLLRKQRTFDNGSIPHQIHLGELHAILRRQ |
| | | EDFYPFLKDNREKIEKILTFRIPYYVGPLARGNSRFAWMTRKSEETIT |
| | | PWNFEEVVDKGASAQSFIERMTNFDKNLPNEKVLPKHSLLYEYFTV |
| | | YNELTKVKYVTEGMRKPAFLSGEQKKAIVDLLFKTNRKVTVKQLKE |
| | | DYFKKIECFDSVEISGVEDRFNASLGTYHDLLKIIKDKDFLDNEENED |
| | | ILEDIVLTLTLFEDREMIEERLKTYAHLFDDKVMKQLKRRRYTGWGR |
| | | LSRKLINGIRDKQSGKTILDFLKSDGFANRNFMQLIHDDSLTFKEDIQ |
| | | KAQVSGQGDSLHEHIANLAGSPAIKKGILQTVKVVDELVKVMGRHK |
| | | PENIVIEMARENQTTQKGQKNSRERMKRIEEGIKEGSSGSETPGTS |
| | | ESATPESSGSEVEFSHEYWMRHALTLAKRARDEREVPVGAVLVLN |
| | | NRVIGEGWNRAIGLHDPTAHAEIMALRQGGLVMQNYRLIDATLYVT |
| | | FEPCVMCAGAMIHSRIGRVVFGVRNAKTGAAGSLMDVLHYPGMNH |
| | | RVEITEGILADECAALLCYFFRMPRQLGSQILKEHPVENTQLQNEKL |
| | | YLYYLQNGRDMYVDQELDINRLSDYDVDHIVPQSFLKDDSIDNKVLT |
| | | RSDKNRGKSDNVPSEEVVKKMKNYWRQLLNAKLITQRKFDNLTKA |
| | | ERGGLSELDKAGFIKRQLVETRQITKHVAQILDSRMNTKYDENDKLI |
| | | REVKVITLKSKLVSDFRKDFQFYKVREINNYHHAHDAYLNAVVGTAL |
| | | IKKYPKLESEFVYGDYKVYDVRKMIAKSEQEIGKATAKYFFYSNIMN |
| | | FFKTEITLANGEIRKRPLIETNGETGEIVWDKGRDFATVRKVLSMPQ |
| | | VNIVKKTEVQTGGFSKESILPKRNSDKLIARKKDWDPKKYGGFDSP |
| | | TVAYSVLVVAKVEKGKSKKLKSVKELLGITIMERSSFEKNPIDFLEAK |
| | | GYKEVKKDLIIKLPKYSLFELENGRKRMLASAGELQKGNELALPSKY |
| | | VNFLYLASHYEKLKGSPEDNEQKQLFVEQHKHYLDEIIEQISEFSKR |
| | | VILADANLDKVLSAYNKHRDKPIREQAENIIHLFTLTNLGAPAAFKYF |
| | | DTTIDRKRYTSTKEVLDATLIHQSITGLYETRIDLSQLGGD |
| 117 Cas9 delta | 1345 | MDKKYSIGLAIGTNSVGWAVITDEYKVPSKKFKVLGNTDRHSIKKNLI |
| 1017-1069 | | GALLFDSGETAEATRLKRTARRRYTRRKNRICYLQEIFSNEMAKVD |
| polypeptide | | DSFFHRLEESFLVEEDKKHERHPIFGNIVDEVAYHEKYPTIYHLRKK |
| sequence | | LVDSTDKADLRLIYLALAHMIKFRGHFLIEGDLNPDNSDVDKLFIQLV |
| | | QTYNQLFEENPINASGVDAKAILSARLSKSRRLENLIAQLPGEKKNG |
| | | LFGNLIALSLGLTPNFKSNFDLAEDAKLQLSKDTYDDDLDNLLAQIG |
| | | DQYADLFLAAKNLSDAILLSDILRVNTEITKAPLSASMIKRYDEHHQD |
| | | LTLLKALVRQQLPEKYKEIFFDQSKNGYAGYIDGGASQEEFYKFIKPI |
| | | LEKMDGTEELLVKLNREDLLRKQRTFDNGSIPHQIHLGELHAILRRQ |
| | | EDFYPFLKDNREKIEKILTFRIPYYVGPLARGNSRFAWMTRKSEETIT |
| | | PWNFEEVVDKGASAQSFIERMTNFDKNLPNEKVLPKHSLLYEYFTV |
| | | YNELTKVKYVTEGMRKPAFLSGEQKKAIVDLLFKTNRKVTVKQLKE |
| | | DYFKKIECFDSVEISGVEDRFNASLGTYHDLLKIIKDKDFLDNEENED |
| | | ILEDIVLTLTLFEDREMIEERLKTYAHLFDDKVMKQLKRRRYTGWGR |
| | | LSRKLINGIRDKQSGKTILDFLKSDGFANRNFMQLIHDDSLTFKEDIQ |
| | | KAQVSGQGDSLHEHIANLAGSPAIKKGILQTVKVVDELVKVMGRHK |
| | | PENIVIEMARENQTTQKGQKNSRERMKRIEEGIKELGSQILKEHPVE |
| | | NTQLQNEKLYLYYLQNGRDMYVDQELDINRLSDYDVDHIVPQSFLK |
| | | DDSIDNKVLTRSDKNRGKSDNVPSEEVVKKMKNYWRQLLNAKLITQ |
| | | RKFDNLTKAERGGLSELDKAGFIKRQLVETRQITKHVAQILDSRMNT |
| | | KYDENDKLIREVKVITLKSKLVSDFRKDFQFYKVREINNYHHAHDAY |
| | | LNAVVGTALIKKYPKLESEFVYGDYKVYSSGSEVEFSHEYWMRHAL |
| | | TLAKRARDEREVPVGAVLVLNNRVIGEGWNRAIGLHDPTAHAEIMA |
| | | LRQGGLVMQNYRLIDATLYVTFEPCVMCAGAMIHSRIGRVVFGVRN |
| | | AKTGAAGSLMDVLHYPGMNHRVEITEGILADECAALLCYFFRMPRQ |
| | | VFNAQKKAQSSTDGEIVWDKGRDFATVRKVLSMPQVNIVKKTEVQ |
| | | TGGFSKESILPKRNSDKLIARKKDWDPKKYGGFDSPTVAYSVLVVA |
| | | KVEKGKSKKLKSVKELLGITIMERSSFEKNPIDFLEAKGYKEVKKDLII |
| | | KLPKYSLFELENGRKRMLASAGELQKGNELALPSKYVNFLYLASHY |
| | | EKLKGSPEDNEQKQLFVEQHKHYLDEIIEQISEFSKRVILADANLDKV |
| | | LSAYNKHRDKPIREQAENIIHLFTLTNLGAPAAFKYFDTTIDRKRYTS |
| | | TKEVLDATLIHQSITGLYETRIDLSQLGGD |
| 118 Cas9 TadA- | 1346 | MDKKYSIGLAIGTNSVGWAVITDEYKVPSKKFKVLGNTDRHSIKKNLI |
| CP116ins 1067 | | GALLFDSGETAEATRLKRTARRRYTRRKNRICYLQEIFSNEMAKVD |
| polypeptide | | DSFFHRLEESFLVEEDKKHERHPIFGNIVDEVAYHEKYPTIYHLRKK |
| sequence | | LVDSTDKADLRLIYLALAHMIKFRGHFLIEGDLNPDNSDVDKLFIQLV |
| | | QTYNQLFEENPINASGVDAKAILSARLSKSRRLENLIAQLPGEKKNG |
| | | LFGNLIALSLGLTPNFKSNFDLAEDAKLQLSKDTYDDDLDNLLAQIG |
| | | DQYADLFLAAKNLSDAILLSDILRVNTEITKAPLSASMIKRYDEHHQD |
| | | LTLLKALVRQQLPEKYKEIFFDQSKNGYAGYIDGGASQEEFYKFIKPI |
| | | LEKMDGTEELLVKLNREDLLRKQRTFDNGSIPHQIHLGELHAILRRQ |
| | | EDFYPFLKDNREKIEKILTFRIPYYVGPLARGNSRFAWMTRKSEETIT |
| | | PWNFEEVVDKGASAQSFIERMTNFDKNLPNEKVLPKHSLLYEYFTV |
| | | YNELTKVKYVTEGMRKPAFLSGEQKKAIVDLLFKTNRKVTVKQLKE |
| | | DYFKKIECFDSVEISGVEDRFNASLGTYHDLLKIIKDKDFLDNEENED |
| | | ILEDIVLTLTLFEDREMIEERLKTYAHLFDDKVMKQLKRRRYTGWGR |
| | | LSRKLINGIRDKQSGKTILDFLKSDGFANRNFMQLIHDDSLTFKEDIQ |
| | | KAQVSGQGDSLHEHIANLAGSPAIKKGILQTVKVVDELVKVMGRHK |
| | | PENIVIEMARENQTTQKGQKNSRERMKRIEEGIKELGSQILKEHPVE |
| | | NTQLQNEKLYLYYLQNGRDMYVDQELDINRLSDYDVDHIVPQSFLK |
| | | DDSIDNKVLTRSDKNRGKSDNVPSEEVVKKMKNYWRQLLNAKLITQ |
| | | RKFDNLTKAERGGLSELDKAGFIKRQLVETRQITKHVAQILDSRMNT |
| | | KYDENDKLIREVKVITLKSKLVSDFRKDFQFYKVREINNYHHAHDAY |
| | | LNAVVGTALIKKYPKLESEFVYGDYKVYDVRKMIAKSEQEIGKATAK |
| | | YFFYSNIMNFFKTEITLANGEIRKRPLIETNMNHRVEITEGILADECAA |
| | | LLCYFFRMPRQVFNAQKKAQSSTDGSSGSETPGTSESATPESSGS |
| | | EVEFSHEYWMRHALTLAKRARDEREVPVGAVLVLNNRVIGEGWNR |
| | | AIGLHDPTAHAEIMALRQGGLVMQNYRLIDATLYVTFEPCVMCAGA |
| | | MIHSRIGRVVFGVRNAKTGAAGSLMDVLHYPGGETGEIVWDKGRD |
| | | FATVRKVLSMPQVNIVKKTEVQTGGFSKESILPKRNSDKLIARKKDW |
| | | DPKKYGGFDSPTVAYSVLVVAKVEKGKSKKLKSVKELLGITIMERSS |
| | | FEKNPIDFLEAKGYKEVKKDLIIKLPKYSLFELENGRKRMLASAGELQ |
| | | KGNELALPSKYVNFLYLASHYEKLKGSPEDNEQKQLFVEQHKHYLD |
| | | EIIEQISEFSKRVILADANLDKVLSAYNKHRDKPIREQAENIIHLFTLTN |
| | | LGAPAAFKYFDTTIDRKRYTSTKEVLDATLIHQSITGLYETRIDLSQL |
| | | GGD |
| 119 Cas9 TadAins | 1347 | MDKKYSIGLAIGTNSVGWAVITDEYKVPSKKFKVLGNTDRHSIKKNLI |
| 701 polypeptide | | GALLFDSGETAEATRLKRTARRRYTRRKNRICYLQEIFSNEMAKVD |
| sequence | | DSFFHRLEESFLVEEDKKHERHPIFGNIVDEVAYHEKYPTIYHLRKK |
| | | LVDSTDKADLRLIYLALAHMIKFRGHFLIEGDLNPDNSDVDKLFIQLV |
| | | QTYNQLFEENPINASGVDAKAILSARLSKSRRLENLIAQLPGEKKNG |
| | | LFGNLIALSLGLTPNFKSNFDLAEDAKLQLSKDTYDDDLDNLLAQIG |
| | | DQYADLFLAAKNLSDAILLSDILRVNTEITKAPLSASMIKRYDEHHQD |
| | | LTLLKALVRQQLPEKYKEIFFDQSKNGYAGYIDGGASQEEFYKFIKPI |
| | | LEKMDGTEELLVKLNREDLLRKQRTFDNGSIPHQIHLGELHAILRRQ |
| | | EDFYPFLKDNREKIEKILTFRIPYYVGPLARGNSRFAWMTRKSEETIT |
| | | PWNFEEVVDKGASAQSFIERMTNFDKNLPNEKVLPKHSLLYEYFTV |
| | | YNELTKVKYVTEGMRKPAFLSGEQKKAIVDLLFKTNRKVTVKQLKE |
| | | DYFKKIECFDSVEISGVEDRFNASLGTYHDLLKIIKDKDFLDNEENED |
| | | ILEDIVLTLTLFEDREMIEERLKTYAHLFDDKVMKQLKRRRYTGWGR |
| | | LSRKLINGIRDKQSGKTILDFLKSDGFANRNFMQLIHDDSGSSGSET |
| | | PGTSESATPESSGSEVEFSHEYWMRHALTLAKRARDEREVPVGAV |
| | | LVLNNRVIGEGWNRAIGLHDPTAHAEIMALRQGGLVMQNYRLIDAT |
| | | LYVTFEPCVMCAGAMIHSRIGRVVFGVRNAKTGAAGSLMDVLHYP |
| | | GMNHRVEITEGILADECAALLCYFFRMPRQVFNAQKKAQSSTDLTF |
| | | KEDIQKAQVSGQGDSLHEHIANLAGSPAIKKGILQTVKVVDELVKVM |
| | | GRHKPENIVIEMARENQTTQKGQKNSRERMKRIEEGIKELGSQILKE |
| | | HPVENTQLQNEKLYLYYLQNGRDMYVDQELDINRLSDYDVDHIVPQ |
| | | SFLKDDSIDNKVLTRSDKNRGKSDNVPSEEVVKKMKNYWRQLLNA |
| | | KLITQRKFDNLTKAERGGLSELDKAGFIKRQLVETRQITKHVAQILDS |
| | | RMNTKYDENDKLIREVKVITLKSKLVSDFRKDFQFYKVREINNYHHA |
| | | HDAYLNAVVGTALIKKYPKLESEFVYGDYKVYDVRKMIAKSEQEIGK |
| | | ATAKYFFYSNIMNFFKTEITLANGEIRKRPLIETNGETGEIVWDKGRD |
| | | FATVRKVLSMPQVNIVKKTEVQTGGFSKESILPKRNSDKLIARKKDW |
| | | DPKKYGGFDSPTVAYSVLVVAKVEKGKSKKLKSVKELLGITIMERSS |
| | | FEKNPIDFLEAKGYKEVKKDLIIKLPKYSLFELENGRKRMLASAGELQ |
| | | KGNELALPSKYVNFLYLASHYEKLKGSPEDNEQKQLFVEQHKHYLD |
| | | EIIEQISEFSKRVILADANLDKVLSAYNKHRDKPIREQAENIIHLFTLTN |
| | | LGAPAAFKYFDTTIDRKRYTSTKEVLDATLIHQSITGLYETRIDLSQL |
| | | GGD |
| 120 Cas9 | 1348 | MDKKYSIGLAIGTNSVGWAVITDEYKVPSKKFKVLGNTDRHSIKKNLI |
| TadACP136ins | | GALLFDSGETAEATRLKRTARRRYTRRKNRICYLQEIFSNEMAKVD |
| 1248 polypeptide | | DSFFHRLEESFLVEEDKKHERHPIFGNIVDEVAYHEKYPTIYHLRKK |
| sequence | | LVDSTDKADLRLIYLALAHMIKFRGHFLIEGDLNPDNSDVDKLFIQLV |
| | | QTYNQLFEENPINASGVDAKAILSARLSKSRRLENLIAQLPGEKKNG |
| | | LFGNLIALSLGLTPNFKSNFDLAEDAKLQLSKDTYDDDLDNLLAQIG |
| | | DQYADLFLAAKNLSDAILLSDILRVNTEITKAPLSASMIKRYDEHHQD |
| | | LTLLKALVRQQLPEKYKEIFFDQSKNGYAGYIDGGASQEEFYKFIKPI |
| | | LEKMDGTEELLVKLNREDLLRKQRTFDNGSIPHQIHLGELHAILRRQ |
| | | EDFYPFLKDNREKIEKILTFRIPYYVGPLARGNSRFAWMTRKSEETIT |
| | | PWNFEEVVDKGASAQSFIERMTNFDKNLPNEKVLPKHSLLYEYFTV |
| | | YNELTKVKYVTEGMRKPAFLSGEQKKAIVDLLFKTNRKVTVKQLKE |
| | | DYFKKIECFDSVEISGVEDRFNASLGTYHDLLKIIKDKDFLDNEENED |
| | | ILEDIVLTLTLFEDREMIEERLKTYAHLFDDKVMKQLKRRRYTGWGR |
| | | LSRKLINGIRDKQSGKTILDFLKSDGFANRNFMQLIHDDSLTFKEDIQ |
| | | KAQVSGQGDSLHEHIANLAGSPAIKKGILQTVKVVDELVKVMGRHK |
| | | PENIVIEMARENQTTQKGQKNSRERMKRIEEGIKELGSQILKEHPVE |
| | | NTQLQNEKLYLYYLQNGRDMYVDQELDINRLSDYDVDHIVPQSFLK |
| | | DDSIDNKVLTRSDKNRGKSDNVPSEEVVKKMKNYWRQLLNAKLITQ |
| | | RKFDNLTKAERGGLSELDKAGFIKRQLVETRQITKHVAQILDSRMNT |
| | | KYDENDKLIREVKVITLKSKLVSDFRKDFQFYKVREINNYHHAHDAY |
| | | LNAVVGTALIKKYPKLESEFVYGDYKVYDVRKMIAKSEQEIGKATAK |
| | | YFFYSNIMNFFKTEITLANGEIRKRPLIETNGETGEIVWDKGRDFATV |
| | | RKVLSMPQVNIVKKTEVQTGGFSKESILPKRNSDKLIARKKDWDPK |
| | | KYGGFDSPTVAYSVLVVAKVEKGKSKKLKSVKELLGITIMERSSFEK |
| | | NPIDFLEAKGYKEVKKDLIIKLPKYSLFELENGRKRMLASAGELQKG |
| | | NELALPSKYVNFLYLASHYEKLKGSMNHRVEITEGILADECAALLCY |
| | | FFRMPRQVFNAQKKAQSSTDGSSGSETPGTSESATPESSGSEVEF |
| | | SHEYWMRHALTLAKRARDEREVPVGAVLVLNNRVIGEGWNRAIGL |
| | | HDPTAHAEIMALRQGGLVMQNYRLIDATLYVTFEPCVMCAGAMIHS |
| | | RIGRVVFGVRNAKTGAAGSLMDVLHYPGPEDNEQKQLFVEQHKHY |
| | | LDEIIEQISEFSKRVILADANLDKVLSAYNKHRDKPIREQAENIIHLFTL |
| | | TNLGAPAAFKYFDTTIDRKRYTSTKEVLDATLIHQSITGLYETRIDLS |
| | | QLGGD |
| 121 Cas9 | 1349 | MDKKYSIGLAIGTNSVGWAVITDEYKVPSKKFKVLGNTDRHSIKKNLI |
| TadACP136ins | | GALLFDSGETAEATRLKRTARRRYTRRKNRICYLQEIFSNEMAKVD |
| 1052 polypeptide | | DSFFHRLEESFLVEEDKKHERHPIFGNIVDEVAYHEKYPTIYHLRKK |
| sequence | | LVDSTDKADLRLIYLALAHMIKFRGHFLIEGDLNPDNSDVDKLFIQLV |
| | | QTYNQLFEENPINASGVDAKAILSARLSKSRRLENLIAQLPGEKKNG |
| | | LFGNLIALSLGLTPNFKSNFDLAEDAKLQLSKDTYDDDLDNLLAQIG |
| | | DQYADLFLAAKNLSDAILLSDILRVNTEITKAPLSASMIKRYDEHHQD |
| | | LTLLKALVRQQLPEKYKEIFFDQSKNGYAGYIDGGASQEEFYKFIKPI |
| | | LEKMDGTEELLVKLNREDLLRKQRTFDNGSIPHQIHLGELHAILRRQ |
| | | EDFYPFLKDNREKIEKILTFRIPYYVGPLARGNSRFAWMTRKSEETIT |
| | | PWNFEEVVDKGASAQSFIERMTNFDKNLPNEKVLPKHSLLYEYFTV |
| | | YNELTKVKYVTEGMRKPAFLSGEQKKAIVDLLFKTNRKVTVKQLKE |
| | | DYFKKIECFDSVEISGVEDRFNASLGTYHDLLKIIKDKDFLDNEENED |
| | | ILEDIVLTLTLFEDREMIEERLKTYAHLFDDKVMKQLKRRRYTGWGR |
| | | LSRKLINGIRDKQSGKTILDFLKSDGFANRNFMQLIHDDSLTFKEDIQ |
| | | KAQVSGQGDSLHEHIANLAGSPAIKKGILQTVKVVDELVKVMGRHK |
| | | PENIVIEMARENQTTQKGQKNSRERMKRIEEGIKELGSQILKEHPVE |
| | | NTQLQNEKLYLYYLQNGRDMYVDQELDINRLSDYDVDHIVPQSFLK |
| | | DDSIDNKVLTRSDKNRGKSDNVPSEEVVKKMKNYWRQLLNAKLITQ |
| | | RKFDNLTKAERGGLSELDKAGFIKRQLVETRQITKHVAQILDSRMNT |
| | | KYDENDKLIREVKVITLKSKLVSDFRKDFQFYKVREINNYHHAHDAY |
| | | LNAVVGTALIKKYPKLESEFVYGDYKVYDVRKMIAKSEQEIGKATAK |
| | | YFFYSNIMNFFKTEITLAMNHRVEITEGILADECAALLCYFFRMPRQV |
| | | FNAQKKAQSSTDGSSGSETPGTSESATPESSGSEVEFSHEYWMR |
| | | HALTLAKRARDEREVPVGAVLVLNNRVIGEGWNRAIGLHDPTAHAE |
| | | IMALRQGGLVMQNYRLIDATLYVTFEPCVMCAGAMIHSRIGRVVFG |
| | | VRNAKTGAAGSLMDVLHYPGNGEIRKRPLIETNGETGEIVWDKGRD |
| | | FATVRKVLSMPQVNIVKKTEVQTGGFSKESILPKRNSDKLIARKKDW |
| | | DPKKYGGFDSPTVAYSVLVVAKVEKGKSKKLKSVKELLGITIMERSS |
| | | FEKNPIDFLEAKGYKEVKKDLIIKLPKYSLFELENGRKRMLASAGELQ |
| | | KGNELALPSKYVNFLYLASHYEKLKGSPEDNEQKQLFVEQHKHYLD |
| | | EIIEQISEFSKRVILADANLDKVLSAYNKHRDKPIREQAENIIHLFTLTN |
| | | LGAPAAFKYFDTTIDRKRYTSTKEVLDATLIHQSITGLYETRIDLSQL |
| | | GGD |
| 122 Cas9 | 1350 | MDKKYSIGLAIGTNSVGWAVITDEYKVPSKKFKVLGNTDRHSIKKNLI |
| TadACP136ins | | GALLFDSGETAEATRLKRTARRRYTRRKNRICYLQEIFSNEMAKVD |
| 1041 polypeptide | | DSFFHRLEESFLVEEDKKHERHPIFGNIVDEVAYHEKYPTIYHLRKK |
| sequence | | LVDSTDKADLRLIYLALAHMIKFRGHFLIEGDLNPDNSDVDKLFIQLV |
| | | QTYNQLFEENPINASGVDAKAILSARLSKSRRLENLIAQLPGEKKNG |
| | | LFGNLIALSLGLTPNFKSNFDLAEDAKLQLSKDTYDDDLDNLLAQIG |
| | | DQYADLFLAAKNLSDAILLSDILRVNTEITKAPLSASMIKRYDEHHQD |
| | | LTLLKALVRQQLPEKYKEIFFDQSKNGYAGYIDGGASQEEFYKFIKPI |
| | | LEKMDGTEELLVKLNREDLLRKQRTFDNGSIPHQIHLGELHAILRRQ |
| | | EDFYPFLKDNREKIEKILTFRIPYYVGPLARGNSRFAWMTRKSEETIT |
| | | PWNFEEVVDKGASAQSFIERMTNFDKNLPNEKVLPKHSLLYEYFTV |
| | | YNELTKVKYVTEGMRKPAFLSGEQKKAIVDLLFKTNRKVTVKQLKE |
| | | DYFKKIECFDSVEISGVEDRFNASLGTYHDLLKIIKDKDFLDNEENED |
| | | ILEDIVLTLTLFEDREMIEERLKTYAHLFDDKVMKQLKRRRYTGWGR |
| | | LSRKLINGIRDKQSGKTILDFLKSDGFANRNFMQLIHDDSLTFKEDIQ |
| | | KAQVSGQGDSLHEHIANLAGSPAIKKGILQTVKVVDELVKVMGRHK |
| | | PENIVIEMARENQTTQKGQKNSRERMKRIEEGIKELGSQILKEHPVE |
| | | NTQLQNEKLYLYYLQNGRDMYVDQELDINRLSDYDVDHIVPQSFLK |
| | | DDSIDNKVLTRSDKNRGKSDNVPSEEVVKKMKNYWRQLLNAKLITQ |
| | | RKFDNLTKAERGGLSELDKAGFIKRQLVETRQITKHVAQILDSRMNT |
| | | KYDENDKLIREVKVITLKSKLVSDFRKDFQFYKVREINNYHHAHDAY |
| | | LNAVVGTALIKKYPKLESEFVYGDYKVYDVRKMIAKSEQEIGKATAK |
| | | YFFYSMNHRVEITEGILADECAALLCYFFRMPRQVFNAQKKAQSST |
| | | DGSSGSETPGTSESATPESSGSEVEFSHEYWMRHALTLAKRARDE |
| | | REVPVGAVLVLNNRVIGEGWNRAIGLHDPTAHAEIMALRQGGLVM |
| | | QNYRLIDATLYVTFEPCVMCAGAMIHSRIGRVVFGVRNAKTGAAGS |
| | | LMDVLHYPGNIMNFFKTEITLANGEIRKRPLIETNGETGEIVWDKGR |
| | | DFATVRKVLSMPQVNIVKKTEVQTGGFSKESILPKRNSDKLIARKKD |
| | | WDPKKYGGFDSPTVAYSVLVVAKVEKGKSKKLKSVKELLGITIMER |
| | | SSFEKNPIDFLEAKGYKEVKKDLIIKLPKYSLFELENGRKRMLASAGE |
| | | LQKGNELALPSKYVNFLYLASHYEKLKGSPEDNEQKQLFVEQHKHY |
| | | LDEIIEQISEFSKRVILADANLDKVLSAYNKHRDKPIREQAENIIHLFTL |
| | | TNLGAPAAFKYFDTTIDRKRYTSTKEVLDATLIHQSITGLYETRIDLS |
| | | QLGGD |
| 123 Cas9 | 1351 | MDKKYSIGLAIGTNSVGWAVITDEYKVPSKKFKVLGNTDRHSIKKNLI |
| TadACP139ins | | GALLFDSGETAEATRLKRTARRRYTRRKNRICYLQEIFSNEMAKVD |
| 1299 polypeptide | | DSFFHRLEESFLVEEDKKHERHPIFGNIVDEVAYHEKYPTIYHLRKK |
| sequence | | LVDSTDKADLRLIYLALAHMIKFRGHFLIEGDLNPDNSDVDKLFIQLV |
| | | QTYNQLFEENPINASGVDAKAILSARLSKSRRLENLIAQLPGEKKNG |
| | | LFGNLIALSLGLTPNFKSNFDLAEDAKLQLSKDTYDDDLDNLLAQIG |
| | | DQYADLFLAAKNLSDAILLSDILRVNTEITKAPLSASMIKRYDEHHQD |
| | | LTLLKALVRQQLPEKYKEIFFDQSKNGYAGYIDGGASQEEFYKFIKPI |
| | | LEKMDGTEELLVKLNREDLLRKQRTFDNGSIPHQIHLGELHAILRRQ |
| | | EDFYPFLKDNREKIEKILTFRIPYYVGPLARGNSRFAWMTRKSEETIT |
| | | PWNFEEVVDKGASAQSFIERMTNFDKNLPNEKVLPKHSLLYEYFTV |
| | | YNELTKVKYVTEGMRKPAFLSGEQKKAIVDLLFKTNRKVTVKQLKE |
| | | DYFKKIECFDSVEISGVEDRFNASLGTYHDLLKIIKDKDFLDNEENED |
| | | ILEDIVLTLTLFEDREMIEERLKTYAHLFDDKVMKQLKRRRYTGWGR |
| | | LSRKLINGIRDKQSGKTILDFLKSDGFANRNFMQLIHDDSLTFKEDIQ |
| | | KAQVSGQGDSLHEHIANLAGSPAIKKGILQTVKVVDELVKVMGRHK |
| | | PENIVIEMARENQTTQKGQKNSRERMKRIEEGIKELGSQILKEHPVE |
| | | NTQLQNEKLYLYYLQNGRDMYVDQELDINRLSDYDVDHIVPQSFLK |
| | | DDSIDNKVLTRSDKNRGKSDNVPSEEVVKKMKNYWRQLLNAKLITQ |
| | | RKFDNLTKAERGGLSELDKAGFIKRQLVETRQITKHVAQILDSRMNT |
| | | KYDENDKLIREVKVITLKSKLVSDFRKDFQFYKVREINNYHHAHDAY |
| | | LNAVVGTALIKKYPKLESEFVYGDYKVYDVRKMIAKSEQEIGKATAK |
| | | YFFYSNIMNFFKTEITLANGEIRKRPLIETNGETGEIVWDKGRDFATV |
| | | RKVLSMPQVNIVKKTEVQTGGFSKESILPKRNSDKLIARKKDWDPK |
| | | KYGGFDSPTVAYSVLVVAKVEKGKSKKLKSVKELLGITIMERSSFEK |
| | | NPIDFLEAKGYKEVKKDLIIKLPKYSLFELENGRKRMLASAGELQKG |
| | | NELALPSKYVNFLYLASHYEKLKGSPEDNEQKQLFVEQHKHYLDEII |
| | | EQISEFSKRVILADANLDKVLSAYNKHRMNHRVEITEGILADECAALL |
| | | CYFFRMPRQVFNAQKKAQSSTDGSSGSETPGTSESATPESSGSEV |
| | | EFSHEYWMRHALTLAKRARDEREVPVGAVLVLNNRVIGEGWNRAI |
| | | GLHDPTAHAEIMALRQGGLVMQNYRLIDATLYVTFEPCVMCAGAMI |
| | | HSRIGRVVFGVRNAKTGAAGSLMDVLHYPGDKPIREQAENIIHLFTL |
| | | TNLGAPAAFKYFDTTIDRKRYTSTKEVLDATLIHQSITGLYETRIDLS |
| | | QLGGD |
| 124 Cas9 delta | 1352 | MDKKYSIGLAIGTNSVGWAVITDEYKVPSKKFKVLGNTDRHSIKKNLI |
| 792-872 TadAins | | GALLFDSGETAEATRLKRTARRRYTRRKNRICYLQEIFSNEMAKVD |
| polypeptide | | DSFFHRLEESFLVEEDKKHERHPIFGNIVDEVAYHEKYPTIYHLRKK |
| sequence | | LVDSTDKADLRLIYLALAHMIKFRGHFLIEGDLNPDNSDVDKLFIQLV |
| | | QTYNQLFEENPINASGVDAKAILSARLSKSRRLENLIAQLPGEKKNG |
| | | LFGNLIALSLGLTPNFKSNFDLAEDAKLQLSKDTYDDDLDNLLAQIG |
| | | DQYADLFLAAKNLSDAILLSDILRVNTEITKAPLSASMIKRYDEHHQD |
| | | LTLLKALVRQQLPEKYKEIFFDQSKNGYAGYIDGGASQEEFYKFIKPI |
| | | LEKMDGTEELLVKLNREDLLRKQRTFDNGSIPHQIHLGELHAILRRQ |
| | | EDFYPFLKDNREKIEKILTFRIPYYVGPLARGNSRFAWMTRKSEETIT |
| | | PWNFEEVVDKGASAQSFIERMTNFDKNLPNEKVLPKHSLLYEYFTV |
| | | YNELTKVKYVTEGMRKPAFLSGEQKKAIVDLLFKTNRKVTVKQLKE |
| | | DYFKKIECFDSVEISGVEDRFNASLGTYHDLLKIIKDKDFLDNEENED |
| | | ILEDIVLTLTLFEDREMIEERLKTYAHLFDDKVMKQLKRRRYTGWGR |
| | | LSRKLINGIRDKQSGKTILDFLKSDGFANRNFMQLIHDDSLTFKEDIQ |
| | | KAQVSGQGDSLHEHIANLAGSPAIKKGILQTVKVVDELVKVMGRHK |
| | | PENIVIEMARENQTTQKGQKNSRERMKRIEEGIKELGSEVEFSHEY |
| | | WMRHALTLAKRARDEREVPVGAVLVLNNRVIGEGWNRAIGLHDPT |
| | | AHAEIMALRQGGLVMQNYRLIDATLYVTFEPCVMCAGAMIHSRIGR |
| | | VVFGVRNAKTGAAGSLMDVLHYPGMNHRVEITEGILADECAALLCY |
| | | FFRMPRQVFNAQKKAQSSTDEEVVKKMKNYWRQLLNAKLITQRKF |
| | | DNLTKAERGGLSELDKAGFIKRQLVETRQITKHVAQILDSRMNTKYD |
| | | ENDKLIREVKVITLKSKLVSDFRKDFQFYKVREINNYHHAHDAYLNA |
| | | VVGTALIKKYPKLESEFVYGDYKVYDVRKMIAKSEQEIGKATAKYFF |
| | | YSNIMNFFKTEITLANGEIRKRPLIETNGETGEIVWDKGRDFATVRKV |
| | | LSMPQVNIVKKTEVQTGGFSKESILPKRNSDKLIARKKDWDPKKYG |
| | | GFDSPTVAYSVLVVAKVEKGKSKKLKSVKELLGITIMERSSFEKNPI |
| | | DFLEAKGYKEVKKDLIIKLPKYSLFELENGRKRMLASAGELQKGNEL |
| | | ALPSKYVNFLYLASHYEKLKGSPEDNEQKQLFVEQHKHYLDEIIEQI |
| | | SEFSKRVILADANLDKVLSAYNKHRDKPIREQAENIIHLFTLTNLGAP |
| | | AAFKYFDTTIDRKRYTSTKEVLDATLIHQSITGLYETRIDLSQLGGD |
| 125 Cas9 delta | 1353 | MDKKYSIGLAIGTNSVGWAVITDEYKVPSKKFKVLGNTDRHSIKKNLI |
| 792-906 TadAins | | GALLFDSGETAEATRLKRTARRRYTRRKNRICYLQEIFSNEMAKVD |
| polypeptide | | DSFFHRLEESFLVEEDKKHERHPIFGNIVDEVAYHEKYPTIYHLRKK |
| sequence | | LVDSTDKADLRLIYLALAHMIKFRGHFLIEGDLNPDNSDVDKLFIQLV |
| | | QTYNQLFEENPINASGVDAKAILSARLSKSRRLENLIAQLPGEKKNG |
| | | LFGNLIALSLGLTPNFKSNFDLAEDAKLQLSKDTYDDDLDNLLAQIG |
| | | DQYADLFLAAKNLSDAILLSDILRVNTEITKAPLSASMIKRYDEHHQD |
| | | LTLLKALVRQQLPEKYKEIFFDQSKNGYAGYIDGGASQEEFYKFIKPI |
| | | LEKMDGTEELLVKLNREDLLRKQRTFDNGSIPHQIHLGELHAILRRQ |
| | | EDFYPFLKDNREKIEKILTFRIPYYVGPLARGNSRFAWMTRKSEETIT |
| | | PWNFEEVVDKGASAQSFIERMTNFDKNLPNEKVLPKHSLLYEYFTV |
| | | YNELTKVKYVTEGMRKPAFLSGEQKKAIVDLLFKTNRKVTVKQLKE |
| | | DYFKKIECFDSVEISGVEDRFNASLGTYHDLLKIIKDKDFLDNEENED |
| | | ILEDIVLTLTLFEDREMIEERLKTYAHLFDDKVMKQLKRRRYTGWGR |
| | | LSRKLINGIRDKQSGKTILDFLKSDGFANRNFMQLIHDDSLTFKEDIQ |
| | | KAQVSGQGDSLHEHIANLAGSPAIKKGILQTVKVVDELVKVMGRHK |
| | | PENIVIEMARENQTTQKGQKNSRERMKRIEEGIKELGSEVEFSHEY |
| | | WMRHALTLAKRARDEREVPVGAVLVLNNRVIGEGWNRAIGLHDPT |
| | | AHAEIMALRQGGLVMQNYRLIDATLYVTFEPCVMCAGAMIHSRIGR |
| | | VVFGVRNAKTGAAGSLMDVLHYPGMNHRVEITEGILADECAALLCY |
| | | FFRMPRQVFNAQKKAQSSTDGLSELDKAGFIKRQLVETRQITKHVA |
| | | QILDSRMNTKYDENDKLIREVKVITLKSKLVSDFRKDFQFYKVREINN |
| | | YHHAHDAYLNAVVGTALIKKYPKLESEFVYGDYKVYDVRKMIAKSE |
| | | QEIGKATAKYFFYSNIMNFFKTEITLANGEIRKRPLIETNGETGEIVW |
| | | DKGRDFATVRKVLSMPQVNIVKKTEVQTGGFSKESILPKRNSDKLIA |
| | | RKKDWDPKKYGGFDSPTVAYSVLVVAKVEKGKSKKLKSVKELLGIT |
| | | IMERSSFEKNPIDFLEAKGYKEVKKDLIIKLPKYSLFELENGRKRMLA |
| | | SAGELQKGNELALPSKYVNFLYLASHYEKLKGSPEDNEQKQLFVE |
| | | QHKHYLDEIIEQISEFSKRVILADANLDKVLSAYNKHRDKPIREQAEN |
| | | IIHLFTLTNLGAPAAFKYFDTTIDRKRYTSTKEVLDATLIHQSITGLYET |
| | | RIDLSQLGGD |
| 126 TadA CP65ins | 1354 | MDKKYSIGLAIGTNSVGWAVITDEYKVPSKKFKVLGNTDRHSIKKNLI |
| 1003 polypeptide | | GALLFDSGETAEATRLKRTARRRYTRRKNRICYLQEIFSNEMAKVD |
| sequence | | DSFFHRLEESFLVEEDKKHERHPIFGNIVDEVAYHEKYPTIYHLRKK |
| | | LVDSTDKADLRLIYLALAHMIKFRGHFLIEGDLNPDNSDVDKLFIQLV |
| | | QTYNQLFEENPINASGVDAKAILSARLSKSRRLENLIAQLPGEKKNG |
| | | LFGNLIALSLGLTPNFKSNFDLAEDAKLQLSKDTYDDDLDNLLAQIG |
| | | DQYADLFLAAKNLSDAILLSDILRVNTEITKAPLSASMIKRYDEHHQD |
| | | LTLLKALVRQQLPEKYKEIFFDQSKNGYAGYIDGGASQEEFYKFIKPI |
| | | LEKMDGTEELLVKLNREDLLRKQRTFDNGSIPHQIHLGELHAILRRQ |
| | | EDFYPFLKDNREKIEKILTFRIPYYVGPLARGNSRFAWMTRKSEETIT |
| | | PWNFEEVVDKGASAQSFIERMTNFDKNLPNEKVLPKHSLLYEYFTV |
| | | YNELTKVKYVTEGMRKPAFLSGEQKKAIVDLLFKTNRKVTVKQLKE |
| | | DYFKKIECFDSVEISGVEDRFNASLGTYHDLLKIIKDKDFLDNEENED |
| | | ILEDIVLTLTLFEDREMIEERLKTYAHLFDDKVMKQLKRRRYTGWGR |
| | | LSRKLINGIRDKQSGKTILDFLKSDGFANRNFMQLIHDDSLTFKEDIQ |
| | | KAQVSGQGDSLHEHIANLAGSPAIKKGILQTVKVVDELVKVMGRHK |
| | | PENIVIEMARENQTTQKGQKNSRERMKRIEEGIKELGSQILKEHPVE |
| | | NTQLQNEKLYLYYLQNGRDMYVDQELDINRLSDYDVDHIVPQSFLK |
| | | DDSIDNKVLTRSDKNRGKSDNVPSEEVVKKMKNYWRQLLNAKLITQ |
| | | RKFDNLTKAERGGLSELDKAGFIKRQLVETRQITKHVAQILDSRMNT |
| | | KYDENDKLIREVKVITLKSKLVSDFRKDFQFYKVREINNYHHAHDAY |
| | | LNAVVGTALIKKYPKTAHAEIMALRQGGLVMQNYRLIDATLYVTFEP |
| | | CVMCAGAMIHSRIGRVVFGVRNAKTGAAGSLMDVLHYPGMNHRV |
| | | EITEGILADECAALLCYFFRMPRQVFNAQKKAQSSTDGSSGSETPG |
| | | TSESATPESSGSEVEFSHEYWMRHALTLAKRARDEREVPVGAVLV |
| | | LNNRVIGEGWNRAIGLHDPLESEFVYGDYKVYDVRKMIAKSEQEIG |
| | | KATAKYFFYSNIMNFFKTEITLANGEIRKRPLIETNGETGEIVWDKGR |
| | | DFATVRKVLSMPQVNIVKKTEVQTGGFSKESILPKRNSDKLIARKKD |
| | | WDPKKYGGFDSPTVAYSVLVVAKVEKGKSKKLKSVKELLGITIMER |
| | | SSFEKNPIDFLEAKGYKEVKKDLIIKLPKYSLFELENGRKRMLASAGE |
| | | LQKGNELALPSKYVNFLYLASHYEKLKGSPEDNEQKQLFVEQHKHY |
| | | LDEIIEQISEFSKRVILADANLDKVLSAYNKHRDKPIREQAENIIHLFTL |
| | | TNLGAPAAFKYFDTTIDRKRYTSTKEVLDATLIHQSITGLYETRIDLS |
| | | QLGGD |
| 127 TadA CP65ins | 1355 | MDKKYSIGLAIGTNSVGWAVITDEYKVPSKKFKVLGNTDRHSIKKNLI |
| 1016 polypeptide | | GALLFDSGETAEATRLKRTARRRYTRRKNRICYLQEIFSNEMAKVD |
| sequence | | DSFFHRLEESFLVEEDKKHERHPIFGNIVDEVAYHEKYPTIYHLRKK |
| | | LVDSTDKADLRLIYLALAHMIKFRGHFLIEGDLNPDNSDVDKLFIQLV |
| | | QTYNQLFEENPINASGVDAKAILSARLSKSRRLENLIAQLPGEKKNG |
| | | LFGNLIALSLGLTPNFKSNFDLAEDAKLQLSKDTYDDDLDNLLAQIG |
| | | DQYADLFLAAKNLSDAILLSDILRVNTEITKAPLSASMIKRYDEHHQD |
| | | LTLLKALVRQQLPEKYKEIFFDQSKNGYAGYIDGGASQEEFYKFIKPI |
| | | LEKMDGTEELLVKLNREDLLRKQRTFDNGSIPHQIHLGELHAILRRQ |
| | | EDFYPFLKDNREKIEKILTFRIPYYVGPLARGNSRFAWMTRKSEETIT |
| | | PWNFEEVVDKGASAQSFIERMTNFDKNLPNEKVLPKHSLLYEYFTV |
| | | YNELTKVKYVTEGMRKPAFLSGEQKKAIVDLLFKTNRKVTVKQLKE |
| | | DYFKKIECFDSVEISGVEDRFNASLGTYHDLLKIIKDKDFLDNEENED |
| | | ILEDIVLTLTLFEDREMIEERLKTYAHLFDDKVMKQLKRRRYTGWGR |
| | | LSRKLINGIRDKQSGKTILDFLKSDGFANRNFMQLIHDDSLTFKEDIQ |
| | | KAQVSGQGDSLHEHIANLAGSPAIKKGILQTVKVVDELVKVMGRHK |
| | | PENIVIEMARENQTTQKGQKNSRERMKRIEEGIKELGSQILKEHPVE |
| | | NTQLQNEKLYLYYLQNGRDMYVDQELDINRLSDYDVDHIVPQSFLK |
| | | DDSIDNKVLTRSDKNRGKSDNVPSEEVVKKMKNYWRQLLNAKLITQ |
| | | RKFDNLTKAERGGLSELDKAGFIKRQLVETRQITKHVAQILDSRMNT |
| | | KYDENDKLIREVKVITLKSKLVSDFRKDFQFYKVREINNYHHAHDAY |
| | | LNAVVGTALIKKYPKLESEFVYGDYKVTAHAEIMALRQGGLVMQNY |
| | | RLIDATLYVTFEPCVMCAGAMIHSRIGRVVFGVRNAKTGAAGSLMD |
| | | VLHYPGMNHRVEITEGILADECAALLCYFFRMPRQVFNAQKKAQSS |
| | | TDGSSGSETPGTSESATPESSGSEVEFSHEYWMRHALTLAKRARD |
| | | EREVPVGAVLVLNNRVIGEGWNRAIGLHDPYDVRKMIAKSEQEIGK |
| | | ATAKYFFYSNIMNFFKTEITLANGEIRKRPLIETNGETGEIVWDKGRD |
| | | FATVRKVLSMPQVNIVKKTEVQTGGFSKESILPKRNSDKLIARKKDW |
| | | DPKKYGGFDSPTVAYSVLVVAKVEKGKSKKLKSVKELLGITIMERSS |
| | | FEKNPIDFLEAKGYKEVKKDLIIKLPKYSLFELENGRKRMLASAGELQ |
| | | KGNELALPSKYVNFLYLASHYEKLKGSPEDNEQKQLFVEQHKHYLD |
| | | EIIEQISEFSKRVILADANLDKVLSAYNKHRDKPIREQAENIIHLFTLTN |
| | | LGAPAAFKYFDTTIDRKRYTSTKEVLDATLIHQSITGLYETRIDLSQL |
| | | GGD |
| 128 TadA CP65ins | 1356 | MDKKYSIGLAIGTNSVGWAVITDEYKVPSKKFKVLGNTDRHSIKKNLI |
| 1022 polypeptide | | GALLFDSGETAEATRLKRTARRRYTRRKNRICYLQEIFSNEMAKVD |
| sequence | | DSFFHRLEESFLVEEDKKHERHPIFGNIVDEVAYHEKYPTIYHLRKK |
| | | LVDSTDKADLRLIYLALAHMIKFRGHFLIEGDLNPDNSDVDKLFIQLV |
| | | QTYNQLFEENPINASGVDAKAILSARLSKSRRLENLIAQLPGEKKNG |
| | | LFGNLIALSLGLTPNFKSNFDLAEDAKLQLSKDTYDDDLDNLLAQIG |
| | | DQYADLFLAAKNLSDAILLSDILRVNTEITKAPLSASMIKRYDEHHQD |
| | | LTLLKALVRQQLPEKYKEIFFDQSKNGYAGYIDGGASQEEFYKFIKPI |
| | | LEKMDGTEELLVKLNREDLLRKQRTFDNGSIPHQIHLGELHAILRRQ |
| | | EDFYPFLKDNREKIEKILTFRIPYYVGPLARGNSRFAWMTRKSEETIT |
| | | PWNFEEVVDKGASAQSFIERMTNFDKNLPNEKVLPKHSLLYEYFTV |
| | | YNELTKVKYVTEGMRKPAFLSGEQKKAIVDLLFKTNRKVTVKQLKE |
| | | DYFKKIECFDSVEISGVEDRFNASLGTYHDLLKIIKDKDFLDNEENED |
| | | ILEDIVLTLTLFEDREMIEERLKTYAHLFDDKVMKQLKRRRYTGWGR |
| | | LSRKLINGIRDKQSGKTILDFLKSDGFANRNFMQLIHDDSLTFKEDIQ |
| | | KAQVSGQGDSLHEHIANLAGSPAIKKGILQTVKVVDELVKVMGRHK |
| | | PENIVIEMARENQTTQKGQKNSRERMKRIEEGIKELGSQILKEHPVE |
| | | NTQLQNEKLYLYYLQNGRDMYVDQELDINRLSDYDVDHIVPQSFLK |
| | | DDSIDNKVLTRSDKNRGKSDNVPSEEVVKKMKNYWRQLLNAKLITQ |
| | | RKFDNLTKAERGGLSELDKAGFIKRQLVETRQITKHVAQILDSRMNT |
| | | KYDENDKLIREVKVITLKSKLVSDFRKDFQFYKVREINNYHHAHDAY |
| | | LNAVVGTALIKKYPKLESEFVYGDYKVYDVRKMITAHAEIMALRQGG |
| | | LVMQNYRLIDATLYVTFEPCVMCAGAMIHSRIGRVVFGVRNAKTGA |
| | | AGSLMDVLHYPGMNHRVEITEGILADECAALLCYFFRMPRQVFNAQ |
| | | KKAQSSTDGSSGSETPGTSESATPESSGSEVEFSHEYWMRHALTL |
| | | AKRARDEREVPVGAVLVLNNRVIGEGWNRAIGLHDPAKSEQEIGKA |
| | | TAKYFFYSNIMNFFKTEITLANGEIRKRPLIETNGETGEIVWDKGRDF |
| | | ATVRKVLSMPQVNIVKKTEVQTGGFSKESILPKRNSDKLIARKKDW |
| | | DPKKYGGFDSPTVAYSVLVVAKVEKGKSKKLKSVKELLGITIMERSS |
| | | FEKNPIDFLEAKGYKEVKKDLIIKLPKYSLFELENGRKRMLASAGELQ |
| | | KGNELALPSKYVNFLYLASHYEKLKGSPEDNEQKQLFVEQHKHYLD |
| | | EIIEQISEFSKRVILADANLDKVLSAYNKHRDKPIREQAENIIHLFTLTN |
| | | LGAPAAFKYFDTTIDRKRYTSTKEVLDATLIHQSITGLYETRIDLSQL |
| | | GGD |
| 129 TadA CP65ins | 1357 | MDKKYSIGLAIGTNSVGWAVITDEYKVPSKKFKVLGNTDRHSIKKNLI |
| 1029 polypeptide | | GALLFDSGETAEATRLKRTARRRYTRRKNRICYLQEIFSNEMAKVD |
| sequence | | DSFFHRLEESFLVEEDKKHERHPIFGNIVDEVAYHEKYPTIYHLRKK |
| | | LVDSTDKADLRLIYLALAHMIKFRGHFLIEGDLNPDNSDVDKLFIQLV |
| | | QTYNQLFEENPINASGVDAKAILSARLSKSRRLENLIAQLPGEKKNG |
| | | LFGNLIALSLGLTPNFKSNFDLAEDAKLQLSKDTYDDDLDNLLAQIG |
| | | DQYADLFLAAKNLSDAILLSDILRVNTEITKAPLSASMIKRYDEHHQD |
| | | LTLLKALVRQQLPEKYKEIFFDQSKNGYAGYIDGGASQEEFYKFIKPI |
| | | LEKMDGTEELLVKLNREDLLRKQRTFDNGSIPHQIHLGELHAILRRQ |
| | | EDFYPFLKDNREKIEKILTFRIPYYVGPLARGNSRFAWMTRKSEETIT |
| | | PWNFEEVVDKGASAQSFIERMTNFDKNLPNEKVLPKHSLLYEYFTV |
| | | YNELTKVKYVTEGMRKPAFLSGEQKKAIVDLLFKTNRKVTVKQLKE |
| | | DYFKKIECFDSVEISGVEDRFNASLGTYHDLLKIIKDKDFLDNEENED |
| | | ILEDIVLTLTLFEDREMIEERLKTYAHLFDDKVMKQLKRRRYTGWGR |
| | | LSRKLINGIRDKQSGKTILDFLKSDGFANRNFMQLIHDDSLTFKEDIQ |
| | | KAQVSGQGDSLHEHIANLAGSPAIKKGILQTVKVVDELVKVMGRHK |
| | | PENIVIEMARENQTTQKGQKNSRERMKRIEEGIKELGSQILKEHPVE |
| | | NTQLQNEKLYLYYLQNGRDMYVDQELDINRLSDYDVDHIVPQSFLK |
| | | DDSIDNKVLTRSDKNRGKSDNVPSEEVVKKMKNYWRQLLNAKLITQ |
| | | RKFDNLTKAERGGLSELDKAGFIKRQLVETRQITKHVAQILDSRMNT |
| | | KYDENDKLIREVKVITLKSKLVSDFRKDFQFYKVREINNYHHAHDAY |
| | | LNAVVGTALIKKYPKLESEFVYGDYKVYDVRKMIAKSEQEITAHAEI |
| | | MALRQGGLVMQNYRLIDATLYVTFEPCVMCAGAMIHSRIGRVVFGV |
| | | RNAKTGAAGSLMDVLHYPGMNHRVEITEGILADECAALLCYFFRMP |
| | | RQVFNAQKKAQSSTDGSSGSETPGTSESATPESSGSEVEFSHEY |
| | | WMRHALTLAKRARDEREVPVGAVLVLNNRVIGEGWNRAIGLHDPG |
| | | KATAKYFFYSNIMNFFKTEITLANGEIRKRPLIETNGETGEIVWDKGR |
| | | DFATVRKVLSMPQVNIVKKTEVQTGGFSKESILPKRNSDKLIARKKD |
| | | WDPKKYGGFDSPTVAYSVLVVAKVEKGKSKKLKSVKELLGITIMER |
| | | SSFEKNPIDFLEAKGYKEVKKDLIIKLPKYSLFELENGRKRMLASAGE |
| | | LQKGNELALPSKYVNFLYLASHYEKLKGSPEDNEQKQLFVEQHKHY |
| | | LDEIIEQISEFSKRVILADANLDKVLSAYNKHRDKPIREQAENIIHLFTL |
| | | TNLGAPAAFKYFDTTIDRKRYTSTKEVLDATLIHQSITGLYETRIDLS |
| | | QLGGD |
| 130 TadA CP65ins | 1358 | MDKKYSIGLAIGTNSVGWAVITDEYKVPSKKFKVLGNTDRHSIKKNLI |
| 1041 polypeptide | | GALLFDSGETAEATRLKRTARRRYTRRKNRICYLQEIFSNEMAKVD |
| sequence | | DSFFHRLEESFLVEEDKKHERHPIFGNIVDEVAYHEKYPTIYHLRKK |
| | | LVDSTDKADLRLIYLALAHMIKFRGHFLIEGDLNPDNSDVDKLFIQLV |
| | | QTYNQLFEENPINASGVDAKAILSARLSKSRRLENLIAQLPGEKKNG |
| | | LFGNLIALSLGLTPNFKSNFDLAEDAKLQLSKDTYDDDLDNLLAQIG |
| | | DQYADLFLAAKNLSDAILLSDILRVNTEITKAPLSASMIKRYDEHHQD |
| | | LTLLKALVRQQLPEKYKEIFFDQSKNGYAGYIDGGASQEEFYKFIKPI |
| | | LEKMDGTEELLVKLNREDLLRKQRTFDNGSIPHQIHLGELHAILRRQ |
| | | EDFYPFLKDNREKIEKILTFRIPYYVGPLARGNSRFAWMTRKSEETIT |
| | | PWNFEEVVDKGASAQSFIERMTNFDKNLPNEKVLPKHSLLYEYFTV |
| | | YNELTKVKYVTEGMRKPAFLSGEQKKAIVDLLFKTNRKVTVKQLKE |
| | | DYFKKIECFDSVEISGVEDRFNASLGTYHDLLKIIKDKDFLDNEENED |
| | | ILEDIVLTLTLFEDREMIEERLKTYAHLFDDKVMKQLKRRRYTGWGR |
| | | LSRKLINGIRDKQSGKTILDFLKSDGFANRNFMQLIHDDSLTFKEDIQ |
| | | KAQVSGQGDSLHEHIANLAGSPAIKKGILQTVKVVDELVKVMGRHK |
| | | PENIVIEMARENQTTQKGQKNSRERMKRIEEGIKELGSQILKEHPVE |
| | | NTQLQNEKLYLYYLQNGRDMYVDQELDINRLSDYDVDHIVPQSFLK |
| | | DDSIDNKVLTRSDKNRGKSDNVPSEEVVKKMKNYWRQLLNAKLITQ |
| | | RKFDNLTKAERGGLSELDKAGFIKRQLVETRQITKHVAQILDSRMNT |
| | | KYDENDKLIREVKVITLKSKLVSDFRKDFQFYKVREINNYHHAHDAY |
| | | LNAVVGTALIKKYPKLESEFVYGDYKVYDVRKMIAKSEQEIGKATAK |
| | | YFFYSTAHAEIMALRQGGLVMQNYRLIDATLYVTFEPCVMCAGAMI |
| | | HSRIGRVVFGVRNAKTGAAGSLMDVLHYPGMNHRVEITEGILADEC |
| | | AALLCYFFRMPRQVFNAQKKAQSSTDGSSGSETPGTSESATPESS |
| | | GSEVEFSHEYWMRHALTLAKRARDEREVPVGAVLVLNNRVIGEGW |
| | | NRAIGLHDPNIMNFFKTEITLANGEIRKRPLIETNGETGEIVWDKGRD |
| | | FATVRKVLSMPQVNIVKKTEVQTGGFSKESILPKRNSDKLIARKKDW |
| | | DPKKYGGFDSPTVAYSVLVVAKVEKGKSKKLKSVKELLGITIMERSS |
| | | FEKNPIDFLEAKGYKEVKKDLIIKLPKYSLFELENGRKRMLASAGELQ |
| | | KGNELALPSKYVNFLYLASHYEKLKGSPEDNEQKQLFVEQHKHYLD |
| | | EIIEQISEFSKRVILADANLDKVLSAYNKHRDKPIREQAENIIHLFTLTN |
| | | LGAPAAFKYFDTTIDRKRYTSTKEVLDATLIHQSITGLYETRIDLSQL |
| | | GGD |
| 131 TadA CP65ins | 1359 | MDKKYSIGLAIGTNSVGWAVITDEYKVPSKKFKVLGNTDRHSIKKNLI |
| 1054 polypeptide | | GALLFDSGETAEATRLKRTARRRYTRRKNRICYLQEIFSNEMAKVD |
| sequence | | DSFFHRLEESFLVEEDKKHERHPIFGNIVDEVAYHEKYPTIYHLRKK |
| | | LVDSTDKADLRLIYLALAHMIKFRGHFLIEGDLNPDNSDVDKLFIQLV |
| | | QTYNQLFEENPINASGVDAKAILSARLSKSRRLENLIAQLPGEKKNG |
| | | LFGNLIALSLGLTPNFKSNFDLAEDAKLQLSKDTYDDDLDNLLAQIG |
| | | DQYADLFLAAKNLSDAILLSDILRVNTEITKAPLSASMIKRYDEHHQD |
| | | LTLLKALVRQQLPEKYKEIFFDQSKNGYAGYIDGGASQEEFYKFIKPI |
| | | LEKMDGTEELLVKLNREDLLRKQRTFDNGSIPHQIHLGELHAILRRQ |
| | | EDFYPFLKDNREKIEKILTFRIPYYVGPLARGNSRFAWMTRKSEETIT |
| | | PWNFEEVVDKGASAQSFIERMTNFDKNLPNEKVLPKHSLLYEYFTV |
| | | YNELTKVKYVTEGMRKPAFLSGEQKKAIVDLLFKTNRKVTVKQLKE |
| | | DYFKKIECFDSVEISGVEDRFNASLGTYHDLLKIIKDKDFLDNEENED |
| | | ILEDIVLTLTLFEDREMIEERLKTYAHLFDDKVMKQLKRRRYTGWGR |
| | | LSRKLINGIRDKQSGKTILDFLKSDGFANRNFMQLIHDDSLTFKEDIQ |
| | | KAQVSGQGDSLHEHIANLAGSPAIKKGILQTVKVVDELVKVMGRHK |
| | | PENIVIEMARENQTTQKGQKNSRERMKRIEEGIKELGSQILKEHPVE |
| | | NTQLQNEKLYLYYLQNGRDMYVDQELDINRLSDYDVDHIVPQSFLK |
| | | DDSIDNKVLTRSDKNRGKSDNVPSEEVVKKMKNYWRQLLNAKLITQ |
| | | RKFDNLTKAERGGLSELDKAGFIKRQLVETRQITKHVAQILDSRMNT |
| | | KYDENDKLIREVKVITLKSKLVSDFRKDFQFYKVREINNYHHAHDAY |
| | | LNAVVGTALIKKYPKLESEFVYGDYKVYDVRKMIAKSEQEIGKATAK |
| | | YFFYSNIMNFFKTEITLANTAHAEIMALRQGGLVMQNYRLIDATLYVT |
| | | FEPCVMCAGAMIHSRIGRVVFGVRNAKTGAAGSLMDVLHYPGMNH |
| | | RVEITEGILADECAALLCYFFRMPRQVFNAQKKAQSSTDGSSGSET |
| | | PGTSESATPESSGSEVEFSHEYWMRHALTLAKRARDEREVPVGAV |
| | | LVLNNRVIGEGWNRAIGLHDPGEIRKRPLIETNGETGEIVWDKGRDF |
| | | ATVRKVLSMPQVNIVKKTEVQTGGFSKESILPKRNSDKLIARKKDW |
| | | DPKKYGGFDSPTVAYSVLVVAKVEKGKSKKLKSVKELLGITIMERSS |
| | | FEKNPIDFLEAKGYKEVKKDLIIKLPKYSLFELENGRKRMLASAGELQ |
| | | KGNELALPSKYVNFLYLASHYEKLKGSPEDNEQKQLFVEQHKHYLD |
| | | EIIEQISEFSKRVILADANLDKVLSAYNKHRDKPIREQAENIIHLFTLTN |
| | | LGAPAAFKYFDTTIDRKRYTSTKEVLDATLIHQSITGLYETRIDLSQL |
| | | GGD |
| 132 TadA CP65ins | 1360 | MDKKYSIGLAIGTNSVGWAVITDEYKVPSKKFKVLGNTDRHSIKKNLI |
| 1246 polypeptide | | GALLFDSGETAEATRLKRTARRRYTRRKNRICYLQEIFSNEMAKVD |
| sequence | | DSFFHRLEESFLVEEDKKHERHPIFGNIVDEVAYHEKYPTIYHLRKK |
| | | LVDSTDKADLRLIYLALAHMIKFRGHFLIEGDLNPDNSDVDKLFIQLV |
| | | QTYNQLFEENPINASGVDAKAILSARLSKSRRLENLIAQLPGEKKNG |
| | | LFGNLIALSLGLTPNFKSNFDLAEDAKLQLSKDTYDDDLDNLLAQIG |
| | | DQYADLFLAAKNLSDAILLSDILRVNTEITKAPLSASMIKRYDEHHQD |
| | | LTLLKALVRQQLPEKYKEIFFDQSKNGYAGYIDGGASQEEFYKFIKPI |
| | | LEKMDGTEELLVKLNREDLLRKQRTFDNGSIPHQIHLGELHAILRRQ |
| | | EDFYPFLKDNREKIEKILTFRIPYYVGPLARGNSRFAWMTRKSEETIT |
| | | PWNFEEVVDKGASAQSFIERMTNFDKNLPNEKVLPKHSLLYEYFTV |
| | | YNELTKVKYVTEGMRKPAFLSGEQKKAIVDLLFKTNRKVTVKQLKE |
| | | DYFKKIECFDSVEISGVEDRFNASLGTYHDLLKIIKDKDFLDNEENED |
| | | ILEDIVLTLTLFEDREMIEERLKTYAHLFDDKVMKQLKRRRYTGWGR |
| | | LSRKLINGIRDKQSGKTILDFLKSDGFANRNFMQLIHDDSLTFKEDIQ |
| | | KAQVSGQGDSLHEHIANLAGSPAIKKGILQTVKVVDELVKVMGRHK |
| | | PENIVIEMARENQTTQKGQKNSRERMKRIEEGIKELGSQILKEHPVE |
| | | NTQLQNEKLYLYYLQNGRDMYVDQELDINRLSDYDVDHIVPQSFLK |
| | | DDSIDNKVLTRSDKNRGKSDNVPSEEVVKKMKNYWRQLLNAKLITQ |
| | | RKFDNLTKAERGGLSELDKAGFIKRQLVETRQITKHVAQILDSRMNT |
| | | KYDENDKLIREVKVITLKSKLVSDFRKDFQFYKVREINNYHHAHDAY |
| | | LNAVVGTALIKKYPKLESEFVYGDYKVYDVRKMIAKSEQEIGKATAK |
| | | YFFYSNIMNFFKTEITLANGEIRKRPLIETNGETGEIVWDKGRDFATV |
| | | RKVLSMPQVNIVKKTEVQTGGFSKESILPKRNSDKLIARKKDWDPK |
| | | KYGGFDSPTVAYSVLVVAKVEKGKSKKLKSVKELLGITIMERSSFEK |
| | | NPIDFLEAKGYKEVKKDLIIKLPKYSLFELENGRKRMLASAGELQKG |
| | | NELALPSKYVNFLYLASHYEKLKGTAHAEIMALRQGGLVMQNYRLI |
| | | DATLYVTFEPCVMCAGAMIHSRIGRVVFGVRNAKTGAAGSLMDVL |
| | | HYPGMNHRVEITEGILADECAALLCYFFRMPRQVFNAQKKAQSSTD |
| | | GSSGSETPGTSESATPESSGSEVEFSHEYWMRHALTLAKRARDER |
| | | EVPVGAVLVLNNRVIGEGWNRAIGLHDPSPEDNEQKQLFVEQHKH |
| | | YLDEIIEQISEFSKRVILADANLDKVLSAYNKHRDKPIREQAENIIHLFT |
| | | LTNLGAPAAFKYFDTTIDRKRYTSTKEVLDATLIHQSITGLYETRIDLS |
| | | QLGGD |
| TadA polypeptide | 1363 | MGSHMTNDIYFMTLAIEEAKKAAQLGEVPIGAIITKDDEVIARAHNLR |
| sequence | | ETLQQPTAHAEHIAIERAAKVLGSWRLEGCTLYVTLEPCVMCAGTIV |
| | | MSRIPRVVYGADDPKGGCSGSLMNLLQQSNFNHRAIVDKGVLKEA |
| | | CSTLLTTFFKNLRANKKSTN |
| TadA polypeptide | 1364 | MTQDELYMKEAIKEAKKAEEKGEVPIGAVLVINGEIIARAHNLRETEQ |
| sequence | | RSIAHAEMLVIDEACKALGTWRLEGATLYVTLEPCPMCAGAVVLSR |
| | | VEKVVFGAFDPKGGCSGTLMNLLQEERFNHQAEVVSGVLEEECG |
| | | GMLSAFFRELRKKKKAARKNLSE |
| TadA polypeptide | 1365 | MPPAFITGVTSLSDVELDHEYWMRHALTLAKRAWDEREVPVGAVL |
| sequence | | VHNHRVIGEGWNRPIGRHDPTAHAEIMALRQGGLVLQNYRLLDTTL |
| | | YVTLEPCVMCAGAMVHSRIGRVVFGARDAKTGAAGSLIDVLHHPG |
| | | MNHRVEIIEGVLRDECATLLSDFFRMRRQEIKALKKADRAEGAGPA |
| | | V |
| TadA polypeptide | 1366 | MDEYWMQVAMQMAEKAEAAGEVPVGAVLVKDGQQIATGYNLSIS |
| sequence | | QHDPTAHAEILCLRSAGKKLENYRLLDATLYITLEPCAMCAGAMVH |
| | | SRIARVVYGARDEKTGAAGTVVNLLQHPAFNHQVEVTSGVLAEAC |
| | | SAQLSRFFKRRRDEKKALKLAQRAQQGIE |
| TadA polypeptide | 1367 | MDAAKVRSEFDEKMMRYALELADKAEALGEIPVGAVLVDDARNIIG |
| sequence | | EGWNLSIVQSDPTAHAEIIALRNGAKNIQNYRLLNSTLYVTLEPCTM |
| | | CAGAILHSRIKRLVFGASDYKTGAIGSRFHFFDDYKMNHTLEITSGV |
| | | LAEECSQKLSTFFQKRREEKKIEKALLKSLSDK |
| TadA polypeptide | 1368 | MRTDESEDQDHRMMRLALDAARAAAEAGETPVGAVILDPSTGEVI |
| sequence | | ATAGNGPIAAHDPTAHAEIAAMRAAAAKLGNYRLTDLTLVVTLEPCA |
| | | MCAGAISHARIGRVVFGADDPKGGAVVHGPKFFAQPTCHWRPEVT |
| | | GGVLADESADLLRGFFRARRKAKI |
| TadA polypeptide | 1369 | MSSLKKTPIRDDAYWMGKAIREAAKAAARDEVPIGAVIVRDGAVIGR |
| sequence | | GHNLREGSNDPSAHAEMIAIRQAARRSANWRLTGATLYVTLEPCL |
| | | MCMGAIILARLERVVFGCYDPKGGAAGSLYDLSADPRLNHQVRLSP |
| | | GVCQEECGTMLSDFFRDLRRRKKAKATPALFIDERKVPPEP |
| ecTadA | 1370 | MSEVEFSHEYWMRHALTLAKRARDEREVPVGAVLVLNNRVIGEGW |
| polypeptide | | NRAIGLHDPTAHAEIMALRQGGLVMQNYRLIDATLYVTFEPCVMCA |
| sequence | | GAMIHSRIGRVVFGVRNAKTGAAGSLMDVLHYPGMNHRVEITEGIL |
| | | ADECAALLCYFFRMPRQVFNAQKKAQSSTD |
| TadA*7.10 | 8 | MSEVEFSHEYWMRHALTLAKRARDEREVPVGAVLVLNNRVIGEGW |
| | | NRAIGLHDPTAHAEIMALRQGGLVMQNYRLIDATLYVTFEPCVMCA |
| | | GAMIHSRIGRVVFGVRNAKTGAAGSLMDVLHYPGMNHRVEITEGIL |
| | | ADECAALLCYFFRMPRQVFNAQKKAQSSTD |
| TadA*8 | 12 | MSEVEFSHEYWMRHALTLAKRARDEREVPVGAVLVLNNRVIGEGW |
| | | NRAIGLHDPTAHAEIMALRQGGLVMQNYRLIDATLYVTFEPCVMCA |
| | | GAMIHSRIGRVVFGVRNAKTGAAGSLMDVLHYPGMNHRVEITEGIL |
| | | ADECAALLCTFFRMPRQVFNAQKKAQSSTD |
| gRNA scaffold | 224 | GUUUUAGAGCUAGAAAUAGCAAGUUAAAAUAAGGCUAGUCCGU |
| nucleotide | | UAUCAACUUGAAAAAGUGGCACCGAGUCGGUGCUUUU |
| sequence | | |
| gRNA scaffold | 225 | GUUUUUGUACUCUCAAGAUUUAAGUAACUGUACAACGAAACUU |
| nucleotide | | ACACAGUUACUUAAAUCUUGCAGAAGCUACAAAGAUAAGGCUU |
| sequence | | CAUGCCGAAAUCAACACCCUGUCAUUUUAUGGCAGGGUG |
| S. pyogenes gRNA | 226 | GUUUUAGAGCUAGAAAUAGCAAGUUAAAAUAAGGCUAGUCCGU |
| scaffold | | UAUCAACUUGAAAAAGUGGCACCGAGUCGGUGC |
| nucleotide | | |
| sequence | | |
| S. aureus gRNA | 227 | GUUUUAGUACUCUGUAAUGAAAAUUACAGAAUCUACUAAAACA |
| scaffold | | AGGCAAAAUGCCGUGUUUAUCUCGUCAACUUGUUGGCGAGA |
| nucleotide | | |
| sequence | | |
| BhCas12b gRNA | 228 | GUUCUGUCUUUUGGUCAGGACAACCGUCUAGCUAUAAGUGCU |
| scaffold | | GCAGGGUGUGAGAAACUCCUAUUGCUGGACGAUGUCUCUUAC |
| nucleotide | | |
| sequence | | GAGGCAUUAGCAC |
| BvCas12b gRNA | 229 | GACCUAUAGGGUCAAUGAAUCUGUGCGUGUGCCAUAAGUAAU |
| scaffold | | UAAAAAUUACCCACCACAGGAGCACCUGAAAACAGGUGCUUGG |
| nucleotide | | |
| sequence | | CAC |
| gRNA scaffold | 230 | GUUUUAGAGCUAGAAAUAGCAAGUUAAAAUAAGGCUAGUCCGU |
| nucleotide | | UAUCAACUUGAAAAAGUGGGACCGAGUCGGUGCUUUU |
| sequence | | |
| gRNA scaffold | 3000 | GUUUUAGAGCUAGAAAUAGCAAGUUAAAAUAAGGCUAGUCCGU |
| nucleotide | | UAUCAACUUGAAAAAGUGGCACCGAGUCGGUGCUUUU |
| sequence | | |
| BhCas12b gRNA | 243 | GUUCUGUCUUUUGGUCAGGACAACCGUCUAGCUAUAAGUGCU |
| scaffold + guide | | GCAGGGUGUGAGAAACUCCUAUUGCUGGACGAUGUCUCUUAC |
| sequence | | GAGGCAUUAGCACNNNNNNNNNNNNNNNNNNNN |
| BvCas12b gRNA | 244 | GACCUAUAGGGUCAAUGAAUCUGUGCGUGUGCCAUAAGUAAU |
| scaffold + guide | | UAAAAAUUACCCACCACAGGAGCACCUGAAAACAGGUGCUUGG |
| sequence | | CACNNNNNNNNNNNNNNNNNNNN |
| AaCas12b gRNA | 245 | GUCUAAAGGACAGAAUUUUUCAACGGGUGUGCCAAUGGCCAC |
| scaffold + guide | | UUUCCAGGUGGCAAAGCCCGUUGAACUUCUCAAAAAGAACGAU |
| sequence | | CUGAGAAGUGGCACNNNNNNNNNNNNNNNNNNNN |
| SpyMacCas9 | 1307 | MDKKYSIGLDIGTNSVGWAVITDDYKVPSKKFKVLGNTDRHSIKKNL |
| polypeptide | | IGALLFGSGETAEATRLKRTARRRYTRRKNRICYLQEIFSNEMAKVD |
| sequence | | DSFFHRLEESFLVEEDKKHERHPIFGNIVDEVAYHEKYPTIYHLRKK |
| | | LADSTDKADLRLIYLALAHMIKFRGHFLIEGDLNPDNSDVDKLFIQLV |
| | | QIYNQLFEENPINASRVDAKAILSARLSKSRRLENLIAQLPGEKRNGL |
| | | FGNLIALSLGLTPNFKSNFDLAEDAKLQLSKDTYDDDLDNLLAQIGD |
| | | QYADLFLAAKNLSDAILLSDILRVNSEITKAPLSASMIKRYDEHHQDL |
| | | TLLKALVRQQLPEKYKEIFFDQSKNGYAGYIDGGASQEEFYKFIKPIL |
| | | EKMDGTEELLVKLNREDLLRKQRTFDNGSIPHQIHLGELHAILRRQE |
| | | DFYPFLKDNREKIEKILTFRIPYYVGPLARGNSRFAWMTRKSEETITP |
| | | WNFEEVVDKGASAQSFIERMTNFDKNLPNEKVLPKHSLLYEYFTVY |
| | | NELTKVKYVTEGMRKPAFLSGEQKKAIVDLLFKTNRKVTVKQLKED |
| | | YFKKIECFDSVEISGVEDRFNASLGAYHDLLKIIKDKDFLDNEENEDI |
| | | LEDIVLTLTLFEDRGMIEERLKTYAHLFDDKVMKQLKRRRYTGWGR |
| | | LSRKLINGIRDKQSGKTILDFLKSDGFANRNFMQLIHDDSLTFKEDIQ |
| | | KAQVSGQGHSLHEQIANLAGSPAIKKGILQTVKIVDELVKVMGHKPE |
| | | NIVIEMARENQTTQKGQKNSRERMKRIEEGIKELGSQILKEHPVENT |
| | | QLQNEKLYLYYLQNGRDMYVDQELDINRLSDYDVDHIVPQSFIKDD |
| | | SIDNKVLTRSDKNRGKSDNVPSEEVVKKMKNYWRQLLNAKLITQRK |
| | | FDNLTKAERGGLSELDKAGFIKRQLVETRQITKHVAQILDSRMNTKY |
| | | DENDKLIREVKVITLKSKLVSDFRKDFQFYKVREINNYHHAHDAYLN |
| | | AVVGTALIKKYPKLESEFVYGDYKVYDVRKMIAKSEQEIGKATAKYF |
| | | FYSNIMNFFKTEITLANGEIRKRPLIETNGETGEIVWDKGRDFATVRK |
| | | VLSMPQVNIVKKTEIQTVGQNGGLFDDNPKSPLEVTPSKLVPLKKEL |
| | | NPKKYGGYQKPTTAYPVLLITDTKQLIPISVMNKKQFEQNPVKFLRD |
| | | RGYQQVGKNDFIKLPKYTLVDIGDGIKRLWASSKEIHKGNQLVVSKK |
| | | SQILLYHAHHLDSDLSNDYLQNHNQQFDVLFNEIISFSKKCKLGKEHI |
| | | QKIENVYSNKKNSASIEELAESFIKLLGFTQLGATSPFNFLGVKLNQK |
| | | QYKGKKDYILPCTEGTLIRQSITGLYETRVDLSKIGED |
| NLS | 83 | PKKKRKVEGADKRTADGSEFESPKKKRKV |
| NLS | 84 | KRTADGSEFESPKKKRKV |
| NLS | 85 | KRPAATKKAGQAKKKK |
| NLS | 86 | KKTELQTTNAENKTKKL |
| NLS | 87 | KRGINDRNFWRGENGRKTR |
| NLS | 1424 | RKSGKIAAIVVKRPRKPKKKRKV |
| NLS | 90 | MDSLLMNRRKFLYQFKNVRWAKGRRETYLC |
| Linker | 1425 | (SGGS)2 |
| PNMG-B335 | 1426 | MSEVEFSHEYWMRHALTLAKRARDEREVPVGAVLVLNNRVIGEGW |
| ABE8.1_Y147T_ | | NRAIGLHDPTAHAEIMALRQGGLVMQNYRLIDATLYVTFEPCVMCA |
| CP5_NGC | | GAMIHSRIGRVVFGVRNAKTGAAGSLMDVLHYPGMNHRVEITEGIL |
| PAM_monomer | | ADECAALLCTFFRMPRQVFNAQKKAQSSTDSGGSSGGSSGSETP |
| polypeptide | | GTSESATPESSGGSSGGSEIGKATAKYFFYSNIMNFFKTEITLANGE |
| sequence | | IRKRPLIETNGETGEIVWDKGRDFATVRKVLSMPQVNIVKKTEVQTG |
| | | GFSKESILPKRNSDKLIARKKDWDPKKYGGFMQPTVAYSVLVVAKV |
| | | EKGKSKKLKSVKELLGITIMERSSFEKNPIDFLEAKGYKEVKKDLIIKL |
| | | PKYSLFELENGRKRMLASAKFLQKGNELALPSKYVNFLYLASHYEK |
| | | LKGSPEDNEQKQLFVEQHKHYLDEIIEQISEFSKRVILADANLDKVLS |
| | | AYNKHRDKPIREQAENIIHLFTLTNLGAPRAFKYFDTTIARKEYRSTK |
| | | EVLDATLIHQSITGLYETRIDLSQLGGDGGSGGSGGSGGSGGSGG |
| | | SGGMDKKYSIGLAIGTNSVGWAVITDEYKVPSKKFKVLGNTDRHSIK |
| | | KNLIGALLFDSGETAEATRLKRTARRRYTRRKNRICYLQEIFSNEMA |
| | | KVDDSFFHRLEESFLVEEDKKHERHPIFGNIVDEVAYHEKYPTIYHL |
| | | RKKLVDSTDKADLRLIYLALAHMIKFRGHFLIEGDLNPDNSDVDKLFI |
| | | QLVQTYNQLFEENPINASGVDAKAILSARLSKSRRLENLIAQLPGEK |
| | | KNGLFGNLIALSLGLTPNFKSNFDLAEDAKLQLSKDTYDDDLDNLLA |
| | | QIGDQYADLFLAAKNLSDAILLSDILRVNTEITKAPLSASMIKRYDEH |
| | | HQDLTLLKALVRQQLPEKYKEIFFDQSKNGYAGYIDGGASQEEFYK |
| | | FIKPILEKMDGTEELLVKLNREDLLRKQRTFDNGSIPHQIHLGELHAIL |
| | | RRQEDFYPFLKDNREKIEKILTFRIPYYVGPLARGNSRFAWMTRKS |
| | | EETITPWNFEEVVDKGASAQSFIERMTNFDKNLPNEKVLPKHSLLY |
| | | EYFTVYNELTKVKYVTEGMRKPAFLSGEQKKAIVDLLFKTNRKVTVK |
| | | QLKEDYFKKIECFDSVEISGVEDRFNASLGTYHDLLKIIKDKDFLDNE |
| | | ENEDILEDIVLTLTLFEDREMIEERLKTYAHLFDDKVMKQLKRRRYT |
| | | GWGRLSRKLINGIRDKQSGKTILDFLKSDGFANRNFMQLIHDDSLTF |
| | | KEDIQKAQVSGQGDSLHEHIANLAGSPAIKKGILQTVKVVDELVKVM |
| | | GRHKPENIVIEMARENQTTQKGQKNSRERMKRIEEGIKELGSQILKE |
| | | HPVENTQLQNEKLYLYYLQNGRDMYVDQELDINRLSDYDVDHIVPQ |
| | | SFLKDDSIDNKVLTRSDKNRGKSDNVPSEEVVKKMKNYWRQLLNA |
| | | KLITQRKFDNLTKAERGGLSELDKAGFIKRQLVETRQITKHVAQILDS |
| | | RMNTKYDENDKLIREVKVITLKSKLVSDFRKDFQFYKVREINNYHHA |
| | | HDAYLNAVVGTALIKKYPKLESEFVYGDYKVYDVRKMIAKSEQEGA |
| | | DKRTADGSEFESPKKKRKV |
| PNMG- | 1427 | MSEVEFSHEYWMRHALTLAKRAWDEREVPVGAVLVHNNRVIGEG |
| 357_ABE8.14 with | | WNRPIGRHDPTAHAEIMALRQGGLVMQNYRLIDATLYVTLEPCVMC |
| NGC PAM CP5 | | AGAMIHSRIGRVVFGARDAKTGAAGSLMDVLHHPGMNHRVEITEGI |
| polypeptide | | LADECAALLSDFFRMRRQEIKAQKKAQSSTDGGSSGGSSGSETPG |
| sequence | | TSESATPESSGGSSGGSMSEVEFSHEYWMRHALTLAKRARDERE |
| | | VPVGAVLVLNNRVIGEGWNRAIGLHDPTAHAEIMALRQGGLVMQN |
| | | YRLIDATLYVTFEPCVMCAGAMIHSRIGRVVFGVRNAKTGAAGSLM |
| | | DVLHYPGMNHRVEITEGILADECAALLCTFFRMPRQVFNAQKKAQS |
| | | STDSGGSSGGSSGSETPGTSESATPESSGGSSGGSEIGKATAKYF |
| | | FYSNIMNFFKTEITLANGEIRKRPLIETNGETGEIVWDKGRDFATVRK |
| | | VLSMPQVNIVKKTEVQTGGFSKESILPKRNSDKLIARKKDWDPKKY |
| | | GGFMQPTVAYSVLVVAKVEKGKSKKLKSVKELLGITIMERSSFEKN |
| | | PIDFLEAKGYKEVKKDLIIKLPKYSLFELENGRKRMLASAKFLQKGNE |
| | | LALPSKYVNFLYLASHYEKLKGSPEDNEQKQLFVEQHKHYLDEIIEQ |
| | | ISEFSKRVILADANLDKVLSAYNKHRDKPIREQAENIIHLFTLTNLGAP |
| | | RAFKYFDTTIARKEYRSTKEVLDATLIHQSITGLYETRIDLSQLGGDG |
| | | GSGGSGGSGGSGGSGGSGGMDKKYSIGLAIGTNSVGWAVITDEY |
| | | KVPSKKFKVLGNTDRHSIKKNLIGALLFDSGETAEATRLKRTARRRY |
| | | TRRKNRICYLQEIFSNEMAKVDDSFFHRLEESFLVEEDKKHERHPIF |
| | | GNIVDEVAYHEKYPTIYHLRKKLVDSTDKADLRLIYLALAHMIKFRGH |
| | | FLIEGDLNPDNSDVDKLFIQLVQTYNQLFEENPINASGVDAKAILSAR |
| | | LSKSRRLENLIAQLPGEKKNGLFGNLIALSLGLTPNFKSNFDLAEDA |
| | | KLQLSKDTYDDDLDNLLAQIGDQYADLFLAAKNLSDAILLSDILRVNT |
| | | EITKAPLSASMIKRYDEHHQDLTLLKALVRQQLPEKYKEIFFDQSKN |
| | | GYAGYIDGGASQEEFYKFIKPILEKMDGTEELLVKLNREDLLRKQRT |
| | | FDNGSIPHQIHLGELHAILRRQEDFYPFLKDNREKIEKILTFRIPYYVG |
| | | PLARGNSRFAWMTRKSEETITPWNFEEVVDKGASAQSFIERMTNF |
| | | DKNLPNEKVLPKHSLLYEYFTVYNELTKVKYVTEGMRKPAFLSGEQ |
| | | KKAIVDLLFKTNRKVTVKQLKEDYFKKIECFDSVEISGVEDRFNASL |
| | | GTYHDLLKIIKDKDFLDNEENEDILEDIVLTLTLFEDREMIEERLKTYA |
| | | HLFDDKVMKQLKRRRYTGWGRLSRKLINGIRDKQSGKTILDFLKSD |
| | | GFANRNFMQLIHDDSLTFKEDIQKAQVSGQGDSLHEHIANLAGSPAI |
| | | KKGILQTVKVVDELVKVMGRHKPENIVIEMARENQTTQKGQKNSRE |
| | | RMKRIEEGIKELGSQILKEHPVENTQLQNEKLYLYYLQNGRDMYVD |
| | | QELDINRLSDYDVDHIVPQSFLKDDSIDNKVLTRSDKNRGKSDNVP |
| | | SEEVVKKMKNYWRQLLNAKLITQRKFDNLTKAERGGLSELDKAGFI |
| | | KRQLVETRQITKHVAQILDSRMNTKYDENDKLIREVKVITLKSKLVSD |
| | | FRKDFQFYKVREINNYHHAHDAYLNAVVGTALIKKYPKLESEFVYG |
| | | DYKVYDVRKMIAKSEQEGADKRTADGSEFESPKKKRKV |
| ABE8.8-m | 1428 | MSEVEFSHEYWMRHALTLAKRARDEREVPVGAVLVLNNRVIGEGW |
| polypeptide | | NRAIGLHDPTAHAEIMALRQGGLVMQNYRLIDATLYVTFEPCVMCA |
| sequence | | GAMIHSRIGRVVFGVRNAKTGAAGSLMDVLHHPGMNHRVEITEGIL |
| | | ADECAALLCRFFRMPRRVFNAQKKAQSSTDSGGSSGGSSGSETP |
| | | GTSESATPESSGGSSGGSDKKYSIGLAIGTNSVGWAVITDEYKVPS |
| | | KKFKVLGNTDRHSIKKNLIGALLFDSGETAEATRLKRTARRRYTRRK |
| | | NRICYLQEIFSNEMAKVDDSFFHRLEESFLVEEDKKHERHPIFGNIV |
| | | DEVAYHEKYPTIYHLRKKLVDSTDKADLRLIYLALAHMIKFRGHFLIE |
| | | GDLNPDNSDVDKLFIQLVQTYNQLFEENPINASGVDAKAILSARLSK |
| | | SRRLENLIAQLPGEKKNGLFGNLIALSLGLTPNFKSNFDLAEDAKLQ |
| | | LSKDTYDDDLDNLLAQIGDQYADLFLAAKNLSDAILLSDILRVNTEITK |
| | | APLSASMIKRYDEHHQDLTLLKALVRQQLPEKYKEIFFDQSKNGYA |
| | | GYIDGGASQEEFYKFIKPILEKMDGTEELLVKLNREDLLRKQRTFDN |
| | | GSIPHQIHLGELHAILRRQEDFYPFLKDNREKIEKILTFRIPYYVGPLA |
| | | RGNSRFAWMTRKSEETITPWNFEEVVDKGASAQSFIERMTNFDKN |
| | | LPNEKVLPKHSLLYEYFTVYNELTKVKYVTEGMRKPAFLSGEQKKAI |
| | | VDLLFKTNRKVTVKQLKEDYFKKIECFDSVEISGVEDRFNASLGTYH |
| | | DLLKIIKDKDFLDNEENEDILEDIVLTLTLFEDREMIEERLKTYAHLFD |
| | | DKVMKQLKRRRYTGWGRLSRKLINGIRDKQSGKTILDFLKSDGFAN |
| | | RNFMQLIHDDSLTFKEDIQKAQVSGQGDSLHEHIANLAGSPAIKKGI |
| | | LQTVKVVDELVKVMGRHKPENIVIEMARENQTTQKGQKNSRERMK |
| | | RIEEGIKELGSQILKEHPVENTQLQNEKLYLYYLQNGRDMYVDQEL |
| | | DINRLSDYDVDHIVPQSFLKDDSIDNKVLTRSDKNRGKSDNVPSEE |
| | | VVKKMKNYWRQLLNAKLITQRKFDNLTKAERGGLSELDKAGFIKRQ |
| | | LVETRQITKHVAQILDSRMNTKYDENDKLIREVKVITLKSKLVSDFRK |
| | | DFQFYKVREINNYHHAHDAYLNAVVGTALIKKYPKLESEFVYGDYK |
| | | VYDVRKMIAKSEQEIGKATAKYFFYSNIMNFFKTEITLANGEIRKRPLI |
| | | ETNGETGEIVWDKGRDFATVRKVLSMPQVNIVKKTEVQTGGFSKE |
| | | SILPKRNSDKLIARKKDWDPKKYGGFDSPTVAYSVLVVAKVEKGKS |
| | | KKLKSVKELLGITIMERSSFEKNPIDFLEAKGYKEVKKDLIIKLPKYSL |
| | | FELENGRKRMLASAGELQKGNELALPSKYVNFLYLASHYEKLKGSP |
| | | EDNEQKQLFVEQHKHYLDEIIEQISEFSKRVILADANLDKVLSAYNKH |
| | | RDKPIREQAENIIHLFTLTNLGAPAAFKYFDTTIDRKRYTSTKEVLDA |
| | | TLIHQSITGLYETRIDLSQLGGDEGADKRTADGSEFESPKKKRKV |
| ABE8.8-d | 1429 | MSEVEFSHEYWMRHALTLAKRAWDEREVPVGAVLVHNNRVIGEG |
| polypeptide | | WNRPIGRHDPTAHAEIMALRQGGLVMQNYRLIDATLYVTLEPCVMC |
| sequence | | AGAMIHSRIGRVVFGARDAKTGAAGSLMDVLHHPGMNHRVEITEGI |
| | | LADECAALLSDFFRMRRQEIKAQKKAQSSTDSGGSSGGSSGSETP |
| | | GTSESATPESSGGSSGGSSEVEFSHEYWMRHALTLAKRARDERE |
| | | VPVGAVLVLNNRVIGEGWNRAIGLHDPTAHAEIMALRQGGLVMQN |
| | | YRLIDATLYVTFEPCVMCAGAMIHSRIGRVVFGVRNAKTGAAGSLM |
| | | DVLHHPGMNHRVEITEGILADECAALLCRFFRMPRRVFNAQKKAQS |
| | | STDSGGSSGGSSGSETPGTSESATPESSGGSSGGSDKKYSIGLAI |
| | | GTNSVGWAVITDEYKVPSKKFKVLGNTDRHSIKKNLIGALLFDSGET |
| | | AEATRLKRTARRRYTRRKNRICYLQEIFSNEMAKVDDSFFHRLEES |
| | | FLVEEDKKHERHPIFGNIVDEVAYHEKYPTIYHLRKKLVDSTDKADL |
| | | RLIYLALAHMIKFRGHFLIEGDLNPDNSDVDKLFIQLVQTYNQLFEEN |
| | | PINASGVDAKAILSARLSKSRRLENLIAQLPGEKKNGLFGNLIALSLG |
| | | LTPNFKSNFDLAEDAKLQLSKDTYDDDLDNLLAQIGDQYADLFLAAK |
| | | NLSDAILLSDILRVNTEITKAPLSASMIKRYDEHHQDLTLLKALVRQQ |
| | | LPEKYKEIFFDQSKNGYAGYIDGGASQEEFYKFIKPILEKMDGTEEL |
| | | LVKLNREDLLRKQRTFDNGSIPHQIHLGELHAILRRQEDFYPFLKDN |
| | | REKIEKILTFRIPYYVGPLARGNSRFAWMTRKSEETITPWNFEEVVD |
| | | KGASAQSFIERMTNFDKNLPNEKVLPKHSLLYEYFTVYNELTKVKYV |
| | | TEGMRKPAFLSGEQKKAIVDLLFKTNRKVTVKQLKEDYFKKIECFDS |
| | | VEISGVEDRFNASLGTYHDLLKIIKDKDFLDNEENEDILEDIVLTLTLF |
| | | EDREMIEERLKTYAHLFDDKVMKQLKRRRYTGWGRLSRKLINGIRD |
| | | KQSGKTILDFLKSDGFANRNFMQLIHDDSLTFKEDIQKAQVSGQGD |
| | | SLHEHIANLAGSPAIKKGILQTVKVVDELVKVMGRHKPENIVIEMARE |
| | | NQTTQKGQKNSRERMKRIEEGIKELGSQILKEHPVENTQLQNEKLY |
| | | LYYLQNGRDMYVDQELDINRLSDYDVDHIVPQSFLKDDSIDNKVLT |
| | | RSDKNRGKSDNVPSEEVVKKMKNYWRQLLNAKLITQRKFDNLTKA |
| | | ERGGLSELDKAGFIKRQLVETRQITKHVAQILDSRMNTKYDENDKLI |
| | | REVKVITLKSKLVSDFRKDFQFYKVREINNYHHAHDAYLNAVVGTAL |
| | | IKKYPKLESEFVYGDYKVYDVRKMIAKSEQEIGKATAKYFFYSNIMN |
| | | FFKTEITLANGEIRKRPLIETNGETGEIVWDKGRDFATVRKVLSMPQ |
| | | VNIVKKTEVQTGGFSKESILPKRNSDKLIARKKDWDPKKYGGFDSP |
| | | TVAYSVLVVAKVEKGKSKKLKSVKELLGITIMERSSFEKNPIDFLEAK |
| | | GYKEVKKDLIIKLPKYSLFELENGRKRMLASAGELQKGNELALPSKY |
| | | VNFLYLASHYEKLKGSPEDNEQKQLFVEQHKHYLDEIIEQISEFSKR |
| | | VILADANLDKVLSAYNKHRDKPIREQAENIIHLFTLTNLGAPAAFKYF |
| | | DTTIDRKRYTSTKEVLDATLIHQSITGLYETRIDLSQLGGDEGADKRT |
| | | ADGSEFESPKKKRKV |
| ABE8.13-m | 1430 | MSEVEFSHEYWMRHALTLAKRARDEREVPVGAVLVLNNRVIGEGW |
| polypeptide | | NRAIGLHDPTAHAEIMALRQGGLVMQNYRLYDATLYVTFEPCVMCA |
| sequence | | GAMIHSRIGRVVFGVRNAKTGAAGSLMDVLHHPGMNHRVEITEGIL |
| | | ADECAALLCRFFRMPRRVFNAQKKAQSSTDSGGSSGGSSGSETP |
| | | GTSESATPESSGGSSGGSDKKYSIGLAIGTNSVGWAVITDEYKVPS |
| | | KKFKVLGNTDRHSIKKNLIGALLFDSGETAEATRLKRTARRRYTRRK |
| | | NRICYLQEIFSNEMAKVDDSFFHRLEESFLVEEDKKHERHPIFGNIV |
| | | DEVAYHEKYPTIYHLRKKLVDSTDKADLRLIYLALAHMIKFRGHFLIE |
| | | GDLNPDNSDVDKLFIQLVQTYNQLFEENPINASGVDAKAILSARLSK |
| | | SRRLENLIAQLPGEKKNGLFGNLIALSLGLTPNFKSNFDLAEDAKLQ |
| | | LSKDTYDDDLDNLLAQIGDQYADLFLAAKNLSDAILLSDILRVNTEITK |
| | | APLSASMIKRYDEHHQDLTLLKALVRQQLPEKYKEIFFDQSKNGYA |
| | | GYIDGGASQEEFYKFIKPILEKMDGTEELLVKLNREDLLRKQRTFDN |
| | | GSIPHQIHLGELHAILRRQEDFYPFLKDNREKIEKILTFRIPYYVGPLA |
| | | RGNSRFAWMTRKSEETITPWNFEEVVDKGASAQSFIERMTNFDKN |
| | | LPNEKVLPKHSLLYEYFTVYNELTKVKYVTEGMRKPAFLSGEQKKAI |
| | | VDLLFKTNRKVTVKQLKEDYFKKIECFDSVEISGVEDRFNASLGTYH |
| | | DLLKIIKDKDFLDNEENEDILEDIVLTLTLFEDREMIEERLKTYAHLFD |
| | | DKVMKQLKRRRYTGWGRLSRKLINGIRDKQSGKTILDFLKSDGFAN |
| | | RNFMQLIHDDSLTFKEDIQKAQVSGQGDSLHEHIANLAGSPAIKKGI |
| | | LQTVKVVDELVKVMGRHKPENIVIEMARENQTTQKGQKNSRERMK |
| | | RIEEGIKELGSQILKEHPVENTQLQNEKLYLYYLQNGRDMYVDQEL |
| | | DINRLSDYDVDHIVPQSFLKDDSIDNKVLTRSDKNRGKSDNVPSEE |
| | | VVKKMKNYWRQLLNAKLITQRKFDNLTKAERGGLSELDKAGFIKRQ |
| | | LVETRQITKHVAQILDSRMNTKYDENDKLIREVKVITLKSKLVSDFRK |
| | | DFQFYKVREINNYHHAHDAYLNAVVGTALIKKYPKLESEFVYGDYK |
| | | VYDVRKMIAKSEQEIGKATAKYFFYSNIMNFFKTEITLANGEIRKRPLI |
| | | ETNGETGEIVWDKGRDFATVRKVLSMPQVNIVKKTEVQTGGFSKE |
| | | SILPKRNSDKLIARKKDWDPKKYGGFDSPTVAYSVLVVAKVEKGKS |
| | | KKLKSVKELLGITIMERSSFEKNPIDFLEAKGYKEVKKDLIIKLPKYSL |
| | | FELENGRKRMLASAGELQKGNELALPSKYVNFLYLASHYEKLKGSP |
| | | EDNEQKQLFVEQHKHYLDEIIEQISEFSKRVILADANLDKVLSAYNKH |
| | | RDKPIREQAENIIHLFTLTNLGAPAAFKYFDTTIDRKRYTSTKEVLDA |
| | | TLIHQSITGLYETRIDLSQLGGDEGADKRTADGSEFESPKKKRKV |
| ABE8.13-d | 1431 | MSEVEFSHEYWMRHALTLAKRAWDEREVPVGAVLVHNNRVIGEG |
| polypeptide | | WNRPIGRHDPTAHAEIMALRQGGLVMQNYRLIDATLYVTLEPCVMC |
| sequence | | AGAMIHSRIGRVVFGARDAKTGAAGSLMDVLHHPGMNHRVEITEGI |
| | | LADECAALLSDFFRMRRQEIKAQKKAQSSTDSGGSSGGSSGSETP |
| | | GTSESATPESSGGSSGGSSEVEFSHEYWMRHALTLAKRARDERE |
| | | VPVGAVLVLNNRVIGEGWNRAIGLHDPTAHAEIMALRQGGLVMQN |
| | | YRLYDATLYVTFEPCVMCAGAMIHSRIGRVVFGVRNAKTGAAGSLM |
| | | DVLHHPGMNHRVEITEGILADECAALLCRFFRMPRRVFNAQKKAQS |
| | | STDSGGSSGGSSGSETPGTSESATPESSGGSSGGSDKKYSIGLAI |
| | | GTNSVGWAVITDEYKVPSKKFKVLGNTDRHSIKKNLIGALLFDSGET |
| | | AEATRLKRTARRRYTRRKNRICYLQEIFSNEMAKVDDSFFHRLEES |
| | | FLVEEDKKHERHPIFGNIVDEVAYHEKYPTIYHLRKKLVDSTDKADL |
| | | RLIYLALAHMIKFRGHFLIEGDLNPDNSDVDKLFIQLVQTYNQLFEEN |
| | | PINASGVDAKAILSARLSKSRRLENLIAQLPGEKKNGLFGNLIALSLG |
| | | LTPNFKSNFDLAEDAKLQLSKDTYDDDLDNLLAQIGDQYADLFLAAK |
| | | NLSDAILLSDILRVNTEITKAPLSASMIKRYDEHHQDLTLLKALVRQQ |
| | | LPEKYKEIFFDQSKNGYAGYIDGGASQEEFYKFIKPILEKMDGTEEL |
| | | LVKLNREDLLRKQRTFDNGSIPHQIHLGELHAILRRQEDFYPFLKDN |
| | | REKIEKILTFRIPYYVGPLARGNSRFAWMTRKSEETITPWNFEEVVD |
| | | KGASAQSFIERMTNFDKNLPNEKVLPKHSLLYEYFTVYNELTKVKYV |
| | | TEGMRKPAFLSGEQKKAIVDLLFKTNRKVTVKQLKEDYFKKIECFDS |
| | | VEISGVEDRFNASLGTYHDLLKIIKDKDFLDNEENEDILEDIVLTLTLF |
| | | EDREMIEERLKTYAHLFDDKVMKQLKRRRYTGWGRLSRKLINGIRD |
| | | KQSGKTILDFLKSDGFANRNFMQLIHDDSLTFKEDIQKAQVSGQGD |
| | | SLHEHIANLAGSPAIKKGILQTVKVVDELVKVMGRHKPENIVIEMARE |
| | | NQTTQKGQKNSRERMKRIEEGIKELGSQILKEHPVENTQLQNEKLY |
| | | LYYLQNGRDMYVDQELDINRLSDYDVDHIVPQSFLKDDSIDNKVLT |
| | | RSDKNRGKSDNVPSEEVVKKMKNYWRQLLNAKLITQRKFDNLTKA |
| | | ERGGLSELDKAGFIKRQLVETRQITKHVAQILDSRMNTKYDENDKLI |
| | | REVKVITLKSKLVSDFRKDFQFYKVREINNYHHAHDAYLNAVVGTAL |
| | | IKKYPKLESEFVYGDYKVYDVRKMIAKSEQEIGKATAKYFFYSNIMN |
| | | FFKTEITLANGEIRKRPLIETNGETGEIVWDKGRDFATVRKVLSMPQ |
| | | VNIVKKTEVQTGGFSKESILPKRNSDKLIARKKDWDPKKYGGFDSP |
| | | TVAYSVLVVAKVEKGKSKKLKSVKELLGITIMERSSFEKNPIDFLEAK |
| | | GYKEVKKDLIIKLPKYSLFELENGRKRMLASAGELQKGNELALPSKY |
| | | VNFLYLASHYEKLKGSPEDNEQKQLFVEQHKHYLDEIIEQISEFSKR |
| | | VILADANLDKVLSAYNKHRDKPIREQAENIIHLFTLTNLGAPAAFKYF |
| | | DTTIDRKRYTSTKEVLDATLIHQSITGLYETRIDLSQLGGDEGADKRT |
| | | ADGSEFESPKKKRKV |
| ABE8.17-m | 1432 | MSEVEFSHEYWMRHALTLAKRARDEREVPVGAVLVLNNRVIGEGW |
| polypeptide | | NRAIGLHDPTAHAEIMALRQGGLVMQNYRLIDATLYSTFEPCVMCA |
| sequence | | GAMIHSRIGRVVFGVRNAKTGAAGSLMDVLHYPGMNHRVEITEGIL |
| | | ADECAALLCYFFRMPRRVFNAQKKAQSSTDSGGSSGGSSGSETP |
| | | GTSESATPESSGGSSGGSDKKYSIGLAIGTNSVGWAVITDEYKVPS |
| | | KKFKVLGNTDRHSIKKNLIGALLFDSGETAEATRLKRTARRRYTRRK |
| | | NRICYLQEIFSNEMAKVDDSFFHRLEESFLVEEDKKHERHPIFGNIV |
| | | DEVAYHEKYPTIYHLRKKLVDSTDKADLRLIYLALAHMIKFRGHFLIE |
| | | GDLNPDNSDVDKLFIQLVQTYNQLFEENPINASGVDAKAILSARLSK |
| | | SRRLENLIAQLPGEKKNGLFGNLIALSLGLTPNFKSNFDLAEDAKLQ |
| | | LSKDTYDDDLDNLLAQIGDQYADLFLAAKNLSDAILLSDILRVNTEITK |
| | | APLSASMIKRYDEHHQDLTLLKALVRQQLPEKYKEIFFDQSKNGYA |
| | | GYIDGGASQEEFYKFIKPILEKMDGTEELLVKLNREDLLRKQRTFDN |
| | | GSIPHQIHLGELHAILRRQEDFYPFLKDNREKIEKILTFRIPYYVGPLA |
| | | RGNSRFAWMTRKSEETITPWNFEEVVDKGASAQSFIERMTNFDKN |
| | | LPNEKVLPKHSLLYEYFTVYNELTKVKYVTEGMRKPAFLSGEQKKAI |
| | | VDLLFKTNRKVTVKQLKEDYFKKIECFDSVEISGVEDRFNASLGTYH |
| | | DLLKIIKDKDFLDNEENEDILEDIVLTLTLFEDREMIEERLKTYAHLFD |
| | | DKVMKQLKRRRYTGWGRLSRKLINGIRDKQSGKTILDFLKSDGFAN |
| | | RNFMQLIHDDSLTFKEDIQKAQVSGQGDSLHEHIANLAGSPAIKKGI |
| | | LQTVKVVDELVKVMGRHKPENIVIEMARENQTTQKGQKNSRERMK |
| | | RIEEGIKELGSQILKEHPVENTQLQNEKLYLYYLQNGRDMYVDQEL |
| | | DINRLSDYDVDHIVPQSFLKDDSIDNKVLTRSDKNRGKSDNVPSEE |
| | | VVKKMKNYWRQLLNAKLITQRKFDNLTKAERGGLSELDKAGFIKRQ |
| | | LVETRQITKHVAQILDSRMNTKYDENDKLIREVKVITLKSKLVSDFRK |
| | | DFQFYKVREINNYHHAHDAYLNAVVGTALIKKYPKLESEFVYGDYK |
| | | VYDVRKMIAKSEQEIGKATAKYFFYSNIMNFFKTEITLANGEIRKRPLI |
| | | ETNGETGEIVWDKGRDFATVRKVLSMPQVNIVKKTEVQTGGFSKE |
| | | SILPKRNSDKLIARKKDWDPKKYGGFDSPTVAYSVLVVAKVEKGKS |
| | | KKLKSVKELLGITIMERSSFEKNPIDFLEAKGYKEVKKDLIIKLPKYSL |
| | | FELENGRKRMLASAGELQKGNELALPSKYVNFLYLASHYEKLKGSP |
| | | EDNEQKQLFVEQHKHYLDEIIEQISEFSKRVILADANLDKVLSAYNKH |
| | | RDKPIREQAENIIHLFTLTNLGAPAAFKYFDTTIDRKRYTSTKEVLDA |
| | | TLIHQSITGLYETRIDLSQLGGDEGADKRTADGSEFESPKKKRKV |
| ABE8.17-d | 1433 | MSEVEFSHEYWMRHALTLAKRAWDEREVPVGAVLVHNNRVIGEG |
| polypeptide | | WNRPIGRHDPTAHAEIMALRQGGLVMQNYRLIDATLYVTLEPCVMC |
| sequence | | AGAMIHSRIGRVVFGARDAKTGAAGSLMDVLHHPGMNHRVEITEGI |
| | | LADECAALLSDFFRMRRQEIKAQKKAQSSTDSGGSSGGSSGSETP |
| | | GTSESATPESSGGSSGGSSEVEFSHEYWMRHALTLAKRARDERE |
| | | VPVGAVLVLNNRVIGEGWNRAIGLHDPTAHAEIMALRQGGLVMQN |
| | | YRLIDATLYSTFEPCVMCAGAMIHSRIGRVVFGVRNAKTGAAGSLM |
| | | DVLHYPGMNHRVEITEGILADECAALLCYFFRMPRRVFNAQKKAQS |
| | | STDSGGSSGGSSGSETPGTSESATPESSGGSSGGSDKKYSIGLAI |
| | | GTNSVGWAVITDEYKVPSKKFKVLGNTDRHSIKKNLIGALLFDSGET |
| | | AEATRLKRTARRRYTRRKNRICYLQEIFSNEMAKVDDSFFHRLEES |
| | | FLVEEDKKHERHPIFGNIVDEVAYHEKYPTIYHLRKKLVDSTDKADL |
| | | RLIYLALAHMIKFRGHFLIEGDLNPDNSDVDKLFIQLVQTYNQLFEEN |
| | | PINASGVDAKAILSARLSKSRRLENLIAQLPGEKKNGLFGNLIALSLG |
| | | LTPNFKSNFDLAEDAKLQLSKDTYDDDLDNLLAQIGDQYADLFLAAK |
| | | NLSDAILLSDILRVNTEITKAPLSASMIKRYDEHHQDLTLLKALVRQQ |
| | | LPEKYKEIFFDQSKNGYAGYIDGGASQEEFYKFIKPILEKMDGTEEL |
| | | LVKLNREDLLRKQRTFDNGSIPHQIHLGELHAILRRQEDFYPFLKDN |
| | | REKIEKILTFRIPYYVGPLARGNSRFAWMTRKSEETITPWNFEEVVD |
| | | KGASAQSFIERMTNFDKNLPNEKVLPKHSLLYEYFTVYNELTKVKYV |
| | | TEGMRKPAFLSGEQKKAIVDLLFKTNRKVTVKQLKEDYFKKIECFDS |
| | | VEISGVEDRFNASLGTYHDLLKIIKDKDFLDNEENEDILEDIVLTLTLF |
| | | EDREMIEERLKTYAHLFDDKVMKQLKRRRYTGWGRLSRKLINGIRD |
| | | KQSGKTILDFLKSDGFANRNFMQLIHDDSLTFKEDIQKAQVSGQGD |
| | | SLHEHIANLAGSPAIKKGILQTVKVVDELVKVMGRHKPENIVIEMARE |
| | | NQTTQKGQKNSRERMKRIEEGIKELGSQILKEHPVENTQLQNEKLY |
| | | LYYLQNGRDMYVDQELDINRLSDYDVDHIVPQSFLKDDSIDNKVLT |
| | | RSDKNRGKSDNVPSEEVVKKMKNYWRQLLNAKLITQRKFDNLTKA |
| | | ERGGLSELDKAGFIKRQLVETRQITKHVAQILDSRMNTKYDENDKLI |
| | | REVKVITLKSKLVSDFRKDFQFYKVREINNYHHAHDAYLNAVVGTAL |
| | | IKKYPKLESEFVYGDYKVYDVRKMIAKSEQEIGKATAKYFFYSNIMN |
| | | FFKTEITLANGEIRKRPLIETNGETGEIVWDKGRDFATVRKVLSMPQ |
| | | VNIVKKTEVQTGGFSKESILPKRNSDKLIARKKDWDPKKYGGFDSP |
| | | TVAYSVLVVAKVEKGKSKKLKSVKELLGITIMERSSFEKNPIDFLEAK |
| | | GYKEVKKDLIIKLPKYSLFELENGRKRMLASAGELQKGNELALPSKY |
| | | VNFLYLASHYEKLKGSPEDNEQKQLFVEQHKHYLDEIIEQISEFSKR |
| | | VILADANLDKVLSAYNKHRDKPIREQAENIIHLFTLTNLGAPAAFKYF |
| | | DTTIDRKRYTSTKEVLDATLIHQSITGLYETRIDLSQLGGDEGADKRT |
| | | ADGSEFESPKKKRKV |
| ABE8.20-m | 1434 | MSEVEFSHEYWMRHALTLAKRARDEREVPVGAVLVLNNRVIGEGW |
| polypeptide | | NRAIGLHDPTAHAEIMALRQGGLVMQNYRLYDATLYSTFEPCVMCA |
| sequence | | GAMIHSRIGRVVFGVRNAKTGAAGSLMDVLHHPGMNHRVEITEGIL |
| | | ADECAALLCRFFRMPRRVFNAQKKAQSSTDSGGSSGGSSGSETP |
| | | GTSESATPESSGGSSGGSDKKYSIGLAIGTNSVGWAVITDEYKVPS |
| | | KKFKVLGNTDRHSIKKNLIGALLFDSGETAEATRLKRTARRRYTRRK |
| | | NRICYLQEIFSNEMAKVDDSFFHRLEESFLVEEDKKHERHPIFGNIV |
| | | DEVAYHEKYPTIYHLRKKLVDSTDKADLRLIYLALAHMIKFRGHFLIE |
| | | GDLNPDNSDVDKLFIQLVQTYNQLFEENPINASGVDAKAILSARLSK |
| | | SRRLENLIAQLPGEKKNGLFGNLIALSLGLTPNFKSNFDLAEDAKLQ |
| | | LSKDTYDDDLDNLLAQIGDQYADLFLAAKNLSDAILLSDILRVNTEITK |
| | | APLSASMIKRYDEHHQDLTLLKALVRQQLPEKYKEIFFDQSKNGYA |
| | | GYIDGGASQEEFYKFIKPILEKMDGTEELLVKLNREDLLRKQRTFDN |
| | | GSIPHQIHLGELHAILRRQEDFYPFLKDNREKIEKILTFRIPYYVGPLA |
| | | RGNSRFAWMTRKSEETITPWNFEEVVDKGASAQSFIERMTNFDKN |
| | | LPNEKVLPKHSLLYEYFTVYNELTKVKYVTEGMRKPAFLSGEQKKAI |
| | | VDLLFKTNRKVTVKQLKEDYFKKIECFDSVEISGVEDRFNASLGTYH |
| | | DLLKIIKDKDFLDNEENEDILEDIVLTLTLFEDREMIEERLKTYAHLFD |
| | | DKVMKQLKRRRYTGWGRLSRKLINGIRDKQSGKTILDFLKSDGFAN |
| | | RNFMQLIHDDSLTFKEDIQKAQVSGQGDSLHEHIANLAGSPAIKKGI |
| | | LQTVKVVDELVKVMGRHKPENIVIEMARENQTTQKGQKNSRERMK |
| | | RIEEGIKELGSQILKEHPVENTQLQNEKLYLYYLQNGRDMYVDQEL |
| | | DINRLSDYDVDHIVPQSFLKDDSIDNKVLTRSDKNRGKSDNVPSEE |
| | | VVKKMKNYWRQLLNAKLITQRKFDNLTKAERGGLSELDKAGFIKRQ |
| | | LVETRQITKHVAQILDSRMNTKYDENDKLIREVKVITLKSKLVSDFRK |
| | | DFQFYKVREINNYHHAHDAYLNAVVGTALIKKYPKLESEFVYGDYK |
| | | VYDVRKMIAKSEQEIGKATAKYFFYSNIMNFFKTEITLANGEIRKRPLI |
| | | ETNGETGEIVWDKGRDFATVRKVLSMPQVNIVKKTEVQTGGFSKE |
| | | SILPKRNSDKLIARKKDWDPKKYGGFDSPTVAYSVLVVAKVEKGKS |
| | | KKLKSVKELLGITIMERSSFEKNPIDFLEAKGYKEVKKDLIIKLPKYSL |
| | | FELENGRKRMLASAGELQKGNELALPSKYVNFLYLASHYEKLKGSP |
| | | EDNEQKQLFVEQHKHYLDEIIEQISEFSKRVILADANLDKVLSAYNKH |
| | | RDKPIREQAENIIHLFTLTNLGAPAAFKYFDTTIDRKRYTSTKEVLDA |
| | | TLIHQSITGLYETRIDLSQLGGDEGADKRTADGSEFESPKKKRKV |
| ABE8.20-d | 1435 | MSEVEFSHEYWMRHALTLAKRAWDEREVPVGAVLVHNNRVIGEG |
| polypeptide | | WNRPIGRHDPTAHAEIMALRQGGLVMQNYRLIDATLYVTLEPCVMC |
| sequence | | AGAMIHSRIGRVVFGARDAKTGAAGSLMDVLHHPGMNHRVEITEGI |
| | | LADECAALLSDFFRMRRQEIKAQKKAQSSTDSGGSSGGSSGSETP |
| | | GTSESATPESSGGSSGGSSEVEFSHEYWMRHALTLAKRARDERE |
| | | VPVGAVLVLNNRVIGEGWNRAIGLHDPTAHAEIMALRQGGLVMQN |
| | | YRLYDATLYSTFEPCVMCAGAMIHSRIGRVVFGVRNAKTGAAGSLM |
| | | DVLHHPGMNHRVEITEGILADECAALLCRFFRMPRRVFNAQKKAQS |
| | | STDSGGSSGGSSGSETPGTSESATPESSGGSSGGSDKKYSIGLAI |
| | | GTNSVGWAVITDEYKVPSKKFKVLGNTDRHSIKKNLIGALLFDSGET |
| | | AEATRLKRTARRRYTRRKNRICYLQEIFSNEMAKVDDSFFHRLEES |
| | | FLVEEDKKHERHPIFGNIVDEVAYHEKYPTIYHLRKKLVDSTDKADL |
| | | RLIYLALAHMIKFRGHFLIEGDLNPDNSDVDKLFIQLVQTYNQLFEEN |
| | | PINASGVDAKAILSARLSKSRRLENLIAQLPGEKKNGLFGNLIALSLG |
| | | LTPNFKSNFDLAEDAKLQLSKDTYDDDLDNLLAQIGDQYADLFLAAK |
| | | NLSDAILLSDILRVNTEITKAPLSASMIKRYDEHHQDLTLLKALVRQQ |
| | | LPEKYKEIFFDQSKNGYAGYIDGGASQEEFYKFIKPILEKMDGTEEL |
| | | LVKLNREDLLRKQRTFDNGSIPHQIHLGELHAILRRQEDFYPFLKDN |
| | | REKIEKILTFRIPYYVGPLARGNSRFAWMTRKSEETITPWNFEEVVD |
| | | KGASAQSFIERMTNFDKNLPNEKVLPKHSLLYEYFTVYNELTKVKYV |
| | | TEGMRKPAFLSGEQKKAIVDLLFKTNRKVTVKQLKEDYFKKIECFDS |
| | | VEISGVEDRFNASLGTYHDLLKIIKDKDFLDNEENEDILEDIVLTLTLF |
| | | EDREMIEERLKTYAHLFDDKVMKQLKRRRYTGWGRLSRKLINGIRD |
| | | KQSGKTILDFLKSDGFANRNFMQLIHDDSLTFKEDIQKAQVSGQGD |
| | | SLHEHIANLAGSPAIKKGILQTVKVVDELVKVMGRHKPENIVIEMARE |
| | | NQTTQKGQKNSRERMKRIEEGIKELGSQILKEHPVENTQLQNEKLY |
| | | LYYLQNGRDMYVDQELDINRLSDYDVDHIVPQSFLKDDSIDNKVLT |
| | | RSDKNRGKSDNVPSEEVVKKMKNYWRQLLNAKLITQRKFDNLTKA |
| | | ERGGLSELDKAGFIKRQLVETRQITKHVAQILDSRMNTKYDENDKLI |
| | | REVKVITLKSKLVSDFRKDFQFYKVREINNYHHAHDAYLNAVVGTAL |
| | | IKKYPKLESEFVYGDYKVYDVRKMIAKSEQEIGKATAKYFFYSNIMN |
| | | FFKTEITLANGEIRKRPLIETNGETGEIVWDKGRDFATVRKVLSMPQ |
| | | VNIVKKTEVQTGGFSKESILPKRNSDKLIARKKDWDPKKYGGFDSP |
| | | TVAYSVLVVAKVEKGKSKKLKSVKELLGITIMERSSFEKNPIDFLEAK |
| | | GYKEVKKDLIIKLPKYSLFELENGRKRMLASAGELQKGNELALPSKY |
| | | VNFLYLASHYEKLKGSPEDNEQKQLFVEQHKHYLDEIIEQISEFSKR |
| | | VILADANLDKVLSAYNKHRDKPIREQAENIIHLFTLTNLGAPAAFKYF |
| | | DTTIDRKRYTSTKEVLDATLIHQSITGLYETRIDLSQLGGDEGADKRT |
| | | ADGSEFESPKKKRKV |
| 01. | 1436 | MSEVEFSHEYWMRHALTLAKRARDEREVPVGAVLVLNNRVIGEGW |
| monoABE8.1_ | | NRAIGLHDPTAHAEIMALRQGGLVMQNYRLIDATLYVTFEPCVMCA |
| bpNLS + Y147T | | GAMIHSRIGRVVFGVRNAKTGAAGSLMDVLHYPGMNHRVEITEGIL |
| polypeptide | | ADECAALLCTFFRMPRQVFNAQKKAQSSTDSGGSSGGSSGSETP |
| sequence | | GTSESATPESSGGSSGGSDKKYSIGLAIGTNSVGWAVITDEYKVPS |
| | | KKFKVLGNTDRHSIKKNLIGALLFDSGETAEATRLKRTARRRYTRRK |
| | | NRICYLQEIFSNEMAKVDDSFFHRLEESFLVEEDKKHERHPIFGNIV |
| | | DEVAYHEKYPTIYHLRKKLVDSTDKADLRLIYLALAHMIKFRGHFLIE |
| | | GDLNPDNSDVDKLFIQLVQTYNQLFEENPINASGVDAKAILSARLSK |
| | | SRRLENLIAQLPGEKKNGLFGNLIALSLGLTPNFKSNFDLAEDAKLQ |
| | | LSKDTYDDDLDNLLAQIGDQYADLFLAAKNLSDAILLSDILRVNTEITK |
| | | APLSASMIKRYDEHHQDLTLLKALVRQQLPEKYKEIFFDQSKNGYA |
| | | GYIDGGASQEEFYKFIKPILEKMDGTEELLVKLNREDLLRKQRTFDN |
| | | GSIPHQIHLGELHAILRRQEDFYPFLKDNREKIEKILTFRIPYYVGPLA |
| | | RGNSRFAWMTRKSEETITPWNFEEVVDKGASAQSFIERMTNFDKN |
| | | LPNEKVLPKHSLLYEYFTVYNELTKVKYVTEGMRKPAFLSGEQKKAI |
| | | VDLLFKTNRKVTVKQLKEDYFKKIECFDSVEISGVEDRFNASLGTYH |
| | | DLLKIIKDKDFLDNEENEDILEDIVLTLTLFEDREMIEERLKTYAHLFD |
| | | DKVMKQLKRRRYTGWGRLSRKLINGIRDKQSGKTILDFLKSDGFAN |
| | | RNFMQLIHDDSLTFKEDIQKAQVSGQGDSLHEHIANLAGSPAIKKGI |
| | | LQTVKVVDELVKVMGRHKPENIVIEMARENQTTQKGQKNSRERMK |
| | | RIEEGIKELGSQILKEHPVENTQLQNEKLYLYYLQNGRDMYVDQEL |
| | | DINRLSDYDVDHIVPQSFLKDDSIDNKVLTRSDKNRGKSDNVPSEE |
| | | VVKKMKNYWRQLLNAKLITQRKFDNLTKAERGGLSELDKAGFIKRQ |
| | | LVETRQITKHVAQILDSRMNTKYDENDKLIREVKVITLKSKLVSDFRK |
| | | DFQFYKVREINNYHHAHDAYLNAVVGTALIKKYPKLESEFVYGDYK |
| | | VYDVRKMIAKSEQEIGKATAKYFFYSNIMNFFKTEITLANGEIRKRPLI |
| | | ETNGETGEIVWDKGRDFATVRKVLSMPQVNIVKKTEVQTGGFSKE |
| | | SILPKRNSDKLIARKKDWDPKKYGGFVSPTVAYSVLVVAKVEKGKS |
| | | KKLKSVKELLGITIMERSSFEKNPIDFLEAKGYKEVKKDLIIKLPKYSL |
| | | FELENGRKRMLASARELQKGNELALPSKYVNFLYLASHYEKLKGSP |
| | | EDNEQKQLFVEQHKHYLDEIIEQISEFSKRVILADANLDKVLSAYNKH |
| | | RDKPIREQAENIIHLFTLTNLGAPAAFKYFDTTIDRKQYRSTKEVLDA |
| | | TLIHQSITGLYETRIDLSQLGGDEGADKRTADGSEFESPKKKRKV |
| 02. | 1437 | MSEVEFSHEYWMRHALTLAKRARDEREVPVGAVLVLNNRVIGEGW |
| monoABE8.1_ | | NRAIGLHDPTAHAEIMALRQGGLVMQNYRLIDATLYVTFEPCVMCA |
| bpNLS + Y147R | | GAMIHSRIGRVVFGVRNAKTGAAGSLMDVLHYPGMNHRVEITEGIL |
| polypeptide | | ADECAALLCRFFRMPRQVFNAQKKAQSSTDSGGSSGGSSGSETP |
| sequence | | GTSESATPESSGGSSGGSDKKYSIGLAIGTNSVGWAVITDEYKVPS |
| | | KKFKVLGNTDRHSIKKNLIGALLFDSGETAEATRLKRTARRRYTRRK |
| | | NRICYLQEIFSNEMAKVDDSFFHRLEESFLVEEDKKHERHPIFGNIV |
| | | DEVAYHEKYPTIYHLRKKLVDSTDKADLRLIYLALAHMIKFRGHFLIE |
| | | GDLNPDNSDVDKLFIQLVQTYNQLFEENPINASGVDAKAILSARLSK |
| | | SRRLENLIAQLPGEKKNGLFGNLIALSLGLTPNFKSNFDLAEDAKLQ |
| | | LSKDTYDDDLDNLLAQIGDQYADLFLAAKNLSDAILLSDILRVNTEITK |
| | | APLSASMIKRYDEHHQDLTLLKALVRQQLPEKYKEIFFDQSKNGYA |
| | | GYIDGGASQEEFYKFIKPILEKMDGTEELLVKLNREDLLRKQRTFDN |
| | | GSIPHQIHLGELHAILRRQEDFYPFLKDNREKIEKILTFRIPYYVGPLA |
| | | RGNSRFAWMTRKSEETITPWNFEEVVDKGASAQSFIERMTNFDKN |
| | | LPNEKVLPKHSLLYEYFTVYNELTKVKYVTEGMRKPAFLSGEQKKAI |
| | | VDLLFKTNRKVTVKQLKEDYFKKIECFDSVEISGVEDRFNASLGTYH |
| | | DLLKIIKDKDFLDNEENEDILEDIVLTLTLFEDREMIEERLKTYAHLFD |
| | | DKVMKQLKRRRYTGWGRLSRKLINGIRDKQSGKTILDFLKSDGFAN |
| | | RNFMQLIHDDSLTFKEDIQKAQVSGQGDSLHEHIANLAGSPAIKKGI |
| | | LQTVKVVDELVKVMGRHKPENIVIEMARENQTTQKGQKNSRERMK |
| | | RIEEGIKELGSQILKEHPVENTQLQNEKLYLYYLQNGRDMYVDQEL |
| | | DINRLSDYDVDHIVPQSFLKDDSIDNKVLTRSDKNRGKSDNVPSEE |
| | | VVKKMKNYWRQLLNAKLITQRKFDNLTKAERGGLSELDKAGFIKRQ |
| | | LVETRQITKHVAQILDSRMNTKYDENDKLIREVKVITLKSKLVSDFRK |
| | | DFQFYKVREINNYHHAHDAYLNAVVGTALIKKYPKLESEFVYGDYK |
| | | VYDVRKMIAKSEQEIGKATAKYFFYSNIMNFFKTEITLANGEIRKRPLI |
| | | ETNGETGEIVWDKGRDFATVRKVLSMPQVNIVKKTEVQTGGFSKE |
| | | SILPKRNSDKLIARKKDWDPKKYGGFVSPTVAYSVLVVAKVEKGKS |
| | | KKLKSVKELLGITIMERSSFEKNPIDFLEAKGYKEVKKDLIIKLPKYSL |
| | | FELENGRKRMLASARELQKGNELALPSKYVNFLYLASHYEKLKGSP |
| | | EDNEQKQLFVEQHKHYLDEIIEQISEFSKRVILADANLDKVLSAYNKH |
| | | RDKPIREQAENIIHLFTLTNLGAPAAFKYFDTTIDRKQYRSTKEVLDA |
| | | TLIHQSITGLYETRIDLSQLGGDEGADKRTADGSEFESPKKKRKV |
| 03. | 1438 | MSEVEFSHEYWMRHALTLAKRARDEREVPVGAVLVLNNRVIGEGW |
| monoABE8.1_ | | NRAIGLHDPTAHAEIMALRQGGLVMQNYRLIDATLYVTFEPCVMCA |
| bpNLS + Q154S | | GAMIHSRIGRVVFGVRNAKTGAAGSLMDVLHYPGMNHRVEITEGIL |
| polypeptide | | ADECAALLCYFFRMPRSVFNAQKKAQSSTDSGGSSGGSSGSETP |
| sequence | | GTSESATPESSGGSSGGSDKKYSIGLAIGTNSVGWAVITDEYKVPS |
| | | KKFKVLGNTDRHSIKKNLIGALLFDSGETAEATRLKRTARRRYTRRK |
| | | NRICYLQEIFSNEMAKVDDSFFHRLEESFLVEEDKKHERHPIFGNIV |
| | | DEVAYHEKYPTIYHLRKKLVDSTDKADLRLIYLALAHMIKFRGHFLIE |
| | | GDLNPDNSDVDKLFIQLVQTYNQLFEENPINASGVDAKAILSARLSK |
| | | SRRLENLIAQLPGEKKNGLFGNLIALSLGLTPNFKSNFDLAEDAKLQ |
| | | LSKDTYDDDLDNLLAQIGDQYADLFLAAKNLSDAILLSDILRVNTEITK |
| | | APLSASMIKRYDEHHQDLTLLKALVRQQLPEKYKEIFFDQSKNGYA |
| | | GYIDGGASQEEFYKFIKPILEKMDGTEELLVKLNREDLLRKQRTFDN |
| | | GSIPHQIHLGELHAILRRQEDFYPFLKDNREKIEKILTFRIPYYVGPLA |
| | | RGNSRFAWMTRKSEETITPWNFEEVVDKGASAQSFIERMTNFDKN |
| | | LPNEKVLPKHSLLYEYFTVYNELTKVKYVTEGMRKPAFLSGEQKKAI |
| | | VDLLFKTNRKVTVKQLKEDYFKKIECFDSVEISGVEDRFNASLGTYH |
| | | DLLKIIKDKDFLDNEENEDILEDIVLTLTLFEDREMIEERLKTYAHLFD |
| | | DKVMKQLKRRRYTGWGRLSRKLINGIRDKQSGKTILDFLKSDGFAN |
| | | RNFMQLIHDDSLTFKEDIQKAQVSGQGDSLHEHIANLAGSPAIKKGI |
| | | LQTVKVVDELVKVMGRHKPENIVIEMARENQTTQKGQKNSRERMK |
| | | RIEEGIKELGSQILKEHPVENTQLQNEKLYLYYLQNGRDMYVDQEL |
| | | DINRLSDYDVDHIVPQSFLKDDSIDNKVLTRSDKNRGKSDNVPSEE |
| | | VVKKMKNYWRQLLNAKLITQRKFDNLTKAERGGLSELDKAGFIKRQ |
| | | LVETRQITKHVAQILDSRMNTKYDENDKLIREVKVITLKSKLVSDFRK |
| | | DFQFYKVREINNYHHAHDAYLNAVVGTALIKKYPKLESEFVYGDYK |
| | | VYDVRKMIAKSEQEIGKATAKYFFYSNIMNFFKTEITLANGEIRKRPLI |
| | | ETNGETGEIVWDKGRDFATVRKVLSMPQVNIVKKTEVQTGGFSKE |
| | | SILPKRNSDKLIARKKDWDPKKYGGFVSPTVAYSVLVVAKVEKGKS |
| | | KKLKSVKELLGITIMERSSFEKNPIDFLEAKGYKEVKKDLIIKLPKYSL |
| | | FELENGRKRMLASARELQKGNELALPSKYVNFLYLASHYEKLKGSP |
| | | EDNEQKQLFVEQHKHYLDEIIEQISEFSKRVILADANLDKVLSAYNKH |
| | | RDKPIREQAENIIHLFTLTNLGAPAAFKYFDTTIDRKQYRSTKEVLDA |
| | | TLIHQSITGLYETRIDLSQLGGDEGADKRTADGSEFESPKKKRKV |
| 04. | 1439 | MSEVEFSHEYWMRHALTLAKRARDEREVPVGAVLVLNNRVIGEGW |
| monoABE8.1_ | | NRAIGLHDPTAHAEIMALRQGGLVMQNYRLIDATLYVTFEPCVMCA |
| bpNLS + Y123H | | GAMIHSRIGRVVFGVRNAKTGAAGSLMDVLHHPGMNHRVEITEGIL |
| polypeptide | | ADECAALLCYFFRMPRQVFNAQKKAQSSTDSGGSSGGSSGSETP |
| sequence | | GTSESATPESSGGSSGGSDKKYSIGLAIGTNSVGWAVITDEYKVPS |
| | | KKFKVLGNTDRHSIKKNLIGALLFDSGETAEATRLKRTARRRYTRRK |
| | | NRICYLQEIFSNEMAKVDDSFFHRLEESFLVEEDKKHERHPIFGNIV |
| | | DEVAYHEKYPTIYHLRKKLVDSTDKADLRLIYLALAHMIKFRGHFLIE |
| | | GDLNPDNSDVDKLFIQLVQTYNQLFEENPINASGVDAKAILSARLSK |
| | | SRRLENLIAQLPGEKKNGLFGNLIALSLGLTPNFKSNFDLAEDAKLQ |
| | | LSKDTYDDDLDNLLAQIGDQYADLFLAAKNLSDAILLSDILRVNTEITK |
| | | APLSASMIKRYDEHHQDLTLLKALVRQQLPEKYKEIFFDQSKNGYA |
| | | GYIDGGASQEEFYKFIKPILEKMDGTEELLVKLNREDLLRKQRTFDN |
| | | GSIPHQIHLGELHAILRRQEDFYPFLKDNREKIEKILTFRIPYYVGPLA |
| | | RGNSRFAWMTRKSEETITPWNFEEVVDKGASAQSFIERMTNFDKN |
| | | LPNEKVLPKHSLLYEYFTVYNELTKVKYVTEGMRKPAFLSGEQKKAI |
| | | VDLLFKTNRKVTVKQLKEDYFKKIECFDSVEISGVEDRFNASLGTYH |
| | | DLLKIIKDKDFLDNEENEDILEDIVLTLTLFEDREMIEERLKTYAHLFD |
| | | DKVMKQLKRRRYTGWGRLSRKLINGIRDKQSGKTILDFLKSDGFAN |
| | | RNFMQLIHDDSLTFKEDIQKAQVSGQGDSLHEHIANLAGSPAIKKGI |
| | | LQTVKVVDELVKVMGRHKPENIVIEMARENQTTQKGQKNSRERMK |
| | | RIEEGIKELGSQILKEHPVENTQLQNEKLYLYYLQNGRDMYVDQEL |
| | | DINRLSDYDVDHIVPQSFLKDDSIDNKVLTRSDKNRGKSDNVPSEE |
| | | VVKKMKNYWRQLLNAKLITQRKFDNLTKAERGGLSELDKAGFIKRQ |
| | | LVETRQITKHVAQILDSRMNTKYDENDKLIREVKVITLKSKLVSDFRK |
| | | DFQFYKVREINNYHHAHDAYLNAVVGTALIKKYPKLESEFVYGDYK |
| | | VYDVRKMIAKSEQEIGKATAKYFFYSNIMNFFKTEITLANGEIRKRPLI |
| | | ETNGETGEIVWDKGRDFATVRKVLSMPQVNIVKKTEVQTGGFSKE |
| | | SILPKRNSDKLIARKKDWDPKKYGGFVSPTVAYSVLVVAKVEKGKS |
| | | KKLKSVKELLGITIMERSSFEKNPIDFLEAKGYKEVKKDLIIKLPKYSL |
| | | FELENGRKRMLASARELQKGNELALPSKYVNFLYLASHYEKLKGSP |
| | | EDNEQKQLFVEQHKHYLDEIIEQISEFSKRVILADANLDKVLSAYNKH |
| | | RDKPIREQAENIIHLFTLTNLGAPAAFKYFDTTIDRKQYRSTKEVLDA |
| | | TLIHQSITGLYETRIDLSQLGGDEGADKRTADGSEFESPKKKRKV |
| 05 | 1440 | MSEVEFSHEYWMRHALTLAKRARDEREVPVGAVLVLNNRVIGEGW |
| monoABE8.1_ | | NRAIGLHDPTAHAEIMALRQGGLVMQNYRLIDATLYSTFEPCVMCA |
| bpNLS + V82S | | GAMIHSRIGRVVFGVRNAKTGAAGSLMDVLHYPGMNHRVEITEGIL |
| polypeptide | | ADECAALLCYFFRMPRQVFNAQKKAQSSTDSGGSSGGSSGSETP |
| sequence | | GTSESATPESSGGSSGGSDKKYSIGLAIGTNSVGWAVITDEYKVPS |
| | | KKFKVLGNTDRHSIKKNLIGALLFDSGETAEATRLKRTARRRYTRRK |
| | | NRICYLQEIFSNEMAKVDDSFFHRLEESFLVEEDKKHERHPIFGNIV |
| | | DEVAYHEKYPTIYHLRKKLVDSTDKADLRLIYLALAHMIKFRGHFLIE |
| | | GDLNPDNSDVDKLFIQLVQTYNQLFEENPINASGVDAKAILSARLSK |
| | | SRRLENLIAQLPGEKKNGLFGNLIALSLGLTPNFKSNFDLAEDAKLQ |
| | | LSKDTYDDDLDNLLAQIGDQYADLFLAAKNLSDAILLSDILRVNTEITK |
| | | APLSASMIKRYDEHHQDLTLLKALVRQQLPEKYKEIFFDQSKNGYA |
| | | GYIDGGASQEEFYKFIKPILEKMDGTEELLVKLNREDLLRKQRTFDN |
| | | GSIPHQIHLGELHAILRRQEDFYPFLKDNREKIEKILTFRIPYYVGPLA |
| | | RGNSRFAWMTRKSEETITPWNFEEVVDKGASAQSFIERMTNFDKN |
| | | LPNEKVLPKHSLLYEYFTVYNELTKVKYVTEGMRKPAFLSGEQKKAI |
| | | VDLLFKTNRKVTVKQLKEDYFKKIECFDSVEISGVEDRFNASLGTYH |
| | | DLLKIIKDKDFLDNEENEDILEDIVLTLTLFEDREMIEERLKTYAHLFD |
| | | DKVMKQLKRRRYTGWGRLSRKLINGIRDKQSGKTILDFLKSDGFAN |
| | | RNFMQLIHDDSLTFKEDIQKAQVSGQGDSLHEHIANLAGSPAIKKGI |
| | | LQTVKVVDELVKVMGRHKPENIVIEMARENQTTQKGQKNSRERMK |
| | | RIEEGIKELGSQILKEHPVENTQLQNEKLYLYYLQNGRDMYVDQEL |
| | | DINRLSDYDVDHIVPQSFLKDDSIDNKVLTRSDKNRGKSDNVPSEE |
| | | VVKKMKNYWRQLLNAKLITQRKFDNLTKAERGGLSELDKAGFIKRQ |
| | | LVETRQITKHVAQILDSRMNTKYDENDKLIREVKVITLKSKLVSDFRK |
| | | DFQFYKVREINNYHHAHDAYLNAVVGTALIKKYPKLESEFVYGDYK |
| | | VYDVRKMIAKSEQEIGKATAKYFFYSNIMNFFKTEITLANGEIRKRPLI |
| | | ETNGETGEIVWDKGRDFATVRKVLSMPQVNIVKKTEVQTGGFSKE |
| | | SILPKRNSDKLIARKKDWDPKKYGGFVSPTVAYSVLVVAKVEKGKS |
| | | KKLKSVKELLGITIMERSSFEKNPIDFLEAKGYKEVKKDLIIKLPKYSL |
| | | FELENGRKRMLASARELQKGNELALPSKYVNFLYLASHYEKLKGSP |
| | | EDNEQKQLFVEQHKHYLDEIIEQISEFSKRVILADANLDKVLSAYNKH |
| | | RDKPIREQAENIIHLFTLTNLGAPAAFKYFDTTIDRKQYRSTKEVLDA |
| | | TLIHQSITGLYETRIDLSQLGGDEGADKRTADGSEFESPKKKRKV |
| 06. | 1441 | MSEVEFSHEYWMRHALTLAKRARDEREVPVGAVLVLNNRVIGEGW |
| monoABE8.1_bpN | | NRAIGLHDPTAHAEIMALRQGGLVMQNYRLIDATLYVTFEPCVMCA |
| LS + T166R | | GAMIHSRIGRVVFGVRNAKTGAAGSLMDVLHYPGMNHRVEITEGIL |
| polypeptide | | ADECAALLCYFFRMPRQVFNAQKKAQSSRDSGGSSGGSSGSETP |
| sequence | | GTSESATPESSGGSSGGSDKKYSIGLAIGTNSVGWAVITDEYKVPS |
| | | KKFKVLGNTDRHSIKKNLIGALLFDSGETAEATRLKRTARRRYTRRK |
| | | NRICYLQEIFSNEMAKVDDSFFHRLEESFLVEEDKKHERHPIFGNIV |
| | | DEVAYHEKYPTIYHLRKKLVDSTDKADLRLIYLALAHMIKFRGHFLIE |
| | | GDLNPDNSDVDKLFIQLVQTYNQLFEENPINASGVDAKAILSARLSK |
| | | SRRLENLIAQLPGEKKNGLFGNLIALSLGLTPNFKSNFDLAEDAKLQ |
| | | LSKDTYDDDLDNLLAQIGDQYADLFLAAKNLSDAILLSDILRVNTEITK |
| | | APLSASMIKRYDEHHQDLTLLKALVRQQLPEKYKEIFFDQSKNGYA |
| | | GYIDGGASQEEFYKFIKPILEKMDGTEELLVKLNREDLLRKQRTFDN |
| | | GSIPHQIHLGELHAILRRQEDFYPFLKDNREKIEKILTFRIPYYVGPLA |
| | | RGNSRFAWMTRKSEETITPWNFEEVVDKGASAQSFIERMTNFDKN |
| | | LPNEKVLPKHSLLYEYFTVYNELTKVKYVTEGMRKPAFLSGEQKKAI |
| | | VDLLFKTNRKVTVKQLKEDYFKKIECFDSVEISGVEDRFNASLGTYH |
| | | DLLKIIKDKDFLDNEENEDILEDIVLTLTLFEDREMIEERLKTYAHLFD |
| | | DKVMKQLKRRRYTGWGRLSRKLINGIRDKQSGKTILDFLKSDGFAN |
| | | RNFMQLIHDDSLTFKEDIQKAQVSGQGDSLHEHIANLAGSPAIKKGI |
| | | LQTVKVVDELVKVMGRHKPENIVIEMARENQTTQKGQKNSRERMK |
| | | RIEEGIKELGSQILKEHPVENTQLQNEKLYLYYLQNGRDMYVDQEL |
| | | DINRLSDYDVDHIVPQSFLKDDSIDNKVLTRSDKNRGKSDNVPSEE |
| | | VVKKMKNYWRQLLNAKLITQRKFDNLTKAERGGLSELDKAGFIKRQ |
| | | LVETRQITKHVAQILDSRMNTKYDENDKLIREVKVITLKSKLVSDFRK |
| | | DFQFYKVREINNYHHAHDAYLNAVVGTALIKKYPKLESEFVYGDYK |
| | | VYDVRKMIAKSEQEIGKATAKYFFYSNIMNFFKTEITLANGEIRKRPLI |
| | | ETNGETGEIVWDKGRDFATVRKVLSMPQVNIVKKTEVQTGGFSKE |
| | | SILPKRNSDKLIARKKDWDPKKYGGFVSPTVAYSVLVVAKVEKGKS |
| | | KKLKSVKELLGITIMERSSFEKNPIDFLEAKGYKEVKKDLIIKLPKYSL |
| | | FELENGRKRMLASARELQKGNELALPSKYVNFLYLASHYEKLKGSP |
| | | EDNEQKQLFVEQHKHYLDEIIEQISEFSKRVILADANLDKVLSAYNKH |
| | | RDKPIREQAENIIHLFTLTNLGAPAAFKYFDTTIDRKQYRSTKEVLDA |
| | | TLIHQSITGLYETRIDLSQLGGDEGADKRTADGSEFESPKKKRKV |
| 07 | 1442 | MSEVEFSHEYWMRHALTLAKRARDEREVPVGAVLVLNNRVIGEGW |
| monoABE8.1_ | | NRAIGLHDPTAHAEIMALRQGGLVMQNYRLIDATLYVTFEPCVMCA |
| bpNLS + Q154R | | GAMIHSRIGRVVFGVRNAKTGAAGSLMDVLHYPGMNHRVEITEGIL |
| polypeptide | | ADECAALLCYFFRMPRRVFNAQKKAQSSTDSGGSSGGSSGSETP |
| sequence | | GTSESATPESSGGSSGGSDKKYSIGLAIGTNSVGWAVITDEYKVPS |
| | | KKFKVLGNTDRHSIKKNLIGALLFDSGETAEATRLKRTARRRYTRRK |
| | | NRICYLQEIFSNEMAKVDDSFFHRLEESFLVEEDKKHERHPIFGNIV |
| | | DEVAYHEKYPTIYHLRKKLVDSTDKADLRLIYLALAHMIKFRGHFLIE |
| | | GDLNPDNSDVDKLFIQLVQTYNQLFEENPINASGVDAKAILSARLSK |
| | | SRRLENLIAQLPGEKKNGLFGNLIALSLGLTPNFKSNFDLAEDAKLQ |
| | | LSKDTYDDDLDNLLAQIGDQYADLFLAAKNLSDAILLSDILRVNTEITK |
| | | APLSASMIKRYDEHHQDLTLLKALVRQQLPEKYKEIFFDQSKNGYA |
| | | GYIDGGASQEEFYKFIKPILEKMDGTEELLVKLNREDLLRKQRTFDN |
| | | GSIPHQIHLGELHAILRRQEDFYPFLKDNREKIEKILTFRIPYYVGPLA |
| | | RGNSRFAWMTRKSEETITPWNFEEVVDKGASAQSFIERMTNFDKN |
| | | LPNEKVLPKHSLLYEYFTVYNELTKVKYVTEGMRKPAFLSGEQKKAI |
| | | VDLLFKTNRKVTVKQLKEDYFKKIECFDSVEISGVEDRFNASLGTYH |
| | | DLLKIIKDKDFLDNEENEDILEDIVLTLTLFEDREMIEERLKTYAHLFD |
| | | DKVMKQLKRRRYTGWGRLSRKLINGIRDKQSGKTILDFLKSDGFAN |
| | | RNFMQLIHDDSLTFKEDIQKAQVSGQGDSLHEHIANLAGSPAIKKGI |
| | | LQTVKVVDELVKVMGRHKPENIVIEMARENQTTQKGQKNSRERMK |
| | | RIEEGIKELGSQILKEHPVENTQLQNEKLYLYYLQNGRDMYVDQEL |
| | | DINRLSDYDVDHIVPQSFLKDDSIDNKVLTRSDKNRGKSDNVPSEE |
| | | VVKKMKNYWRQLLNAKLITQRKFDNLTKAERGGLSELDKAGFIKRQ |
| | | LVETRQITKHVAQILDSRMNTKYDENDKLIREVKVITLKSKLVSDFRK |
| | | DFQFYKVREINNYHHAHDAYLNAVVGTALIKKYPKLESEFVYGDYK |
| | | VYDVRKMIAKSEQEIGKATAKYFFYSNIMNFFKTEITLANGEIRKRPLI |
| | | ETNGETGEIVWDKGRDFATVRKVLSMPQVNIVKKTEVQTGGFSKE |
| | | SILPKRNSDKLIARKKDWDPKKYGGFVSPTVAYSVLVVAKVEKGKS |
| | | KKLKSVKELLGITIMERSSFEKNPIDFLEAKGYKEVKKDLIIKLPKYSL |
| | | FELENGRKRMLASARELQKGNELALPSKYVNFLYLASHYEKLKGSP |
| | | EDNEQKQLFVEQHKHYLDEIIEQISEFSKRVILADANLDKVLSAYNKH |
| | | RDKPIREQAENIIHLFTLTNLGAPAAFKYFDTTIDRKQYRSTKEVLDA |
| | | TLIHQSITGLYETRIDLSQLGGDEGADKRTADGSEFESPKKKRKV |
| 08. | 1443 | MSEVEFSHEYWMRHALTLAKRARDEREVPVGAVLVLNNRVIGEGW |
| monoABE8.1_ | | NRAIGLHDPTAHAEIMALRQGGLVMQNYRLIDATLYVTFEPCVMCA |
| bpNLS + | | GAMIHSRIGRVVFGVRNAKTGAAGSLMDVLHHPGMNHRVEITEGIL |
| Y147R_Q154R_ | | ADECAALLCRFFRMPRRVFNAQKKAQSSTDSGGSSGGSSGSETP |
| Y123H polypeptide | | GTSESATPESSGGSSGGSDKKYSIGLAIGTNSVGWAVITDEYKVPS |
| sequence | | KKFKVLGNTDRHSIKKNLIGALLFDSGETAEATRLKRTARRRYTRRK |
| | | NRICYLQEIFSNEMAKVDDSFFHRLEESFLVEEDKKHERHPIFGNIV |
| | | DEVAYHEKYPTIYHLRKKLVDSTDKADLRLIYLALAHMIKFRGHFLIE |
| | | GDLNPDNSDVDKLFIQLVQTYNQLFEENPINASGVDAKAILSARLSK |
| | | SRRLENLIAQLPGEKKNGLFGNLIALSLGLTPNFKSNFDLAEDAKLQ |
| | | LSKDTYDDDLDNLLAQIGDQYADLFLAAKNLSDAILLSDILRVNTEITK |
| | | APLSASMIKRYDEHHQDLTLLKALVRQQLPEKYKEIFFDQSKNGYA |
| | | GYIDGGASQEEFYKFIKPILEKMDGTEELLVKLNREDLLRKQRTFDN |
| | | GSIPHQIHLGELHAILRRQEDFYPFLKDNREKIEKILTFRIPYYVGPLA |
| | | RGNSRFAWMTRKSEETITPWNFEEVVDKGASAQSFIERMTNFDKN |
| | | LPNEKVLPKHSLLYEYFTVYNELTKVKYVTEGMRKPAFLSGEQKKAI |
| | | VDLLFKTNRKVTVKQLKEDYFKKIECFDSVEISGVEDRFNASLGTYH |
| | | DLLKIIKDKDFLDNEENEDILEDIVLTLTLFEDREMIEERLKTYAHLFD |
| | | DKVMKQLKRRRYTGWGRLSRKLINGIRDKQSGKTILDFLKSDGFAN |
| | | RNFMQLIHDDSLTFKEDIQKAQVSGQGDSLHEHIANLAGSPAIKKGI |
| | | LQTVKVVDELVKVMGRHKPENIVIEMARENQTTQKGQKNSRERMK |
| | | RIEEGIKELGSQILKEHPVENTQLQNEKLYLYYLQNGRDMYVDQEL |
| | | DINRLSDYDVDHIVPQSFLKDDSIDNKVLTRSDKNRGKSDNVPSEE |
| | | VVKKMKNYWRQLLNAKLITQRKFDNLTKAERGGLSELDKAGFIKRQ |
| | | LVETRQITKHVAQILDSRMNTKYDENDKLIREVKVITLKSKLVSDFRK |
| | | DFQFYKVREINNYHHAHDAYLNAVVGTALIKKYPKLESEFVYGDYK |
| | | VYDVRKMIAKSEQEIGKATAKYFFYSNIMNFFKTEITLANGEIRKRPLI |
| | | ETNGETGEIVWDKGRDFATVRKVLSMPQVNIVKKTEVQTGGFSKE |
| | | SILPKRNSDKLIARKKDWDPKKYGGFVSPTVAYSVLVVAKVEKGKS |
| | | KKLKSVKELLGITIMERSSFEKNPIDFLEAKGYKEVKKDLIIKLPKYSL |
| | | FELENGRKRMLASARELQKGNELALPSKYVNFLYLASHYEKLKGSP |
| | | EDNEQKQLFVEQHKHYLDEIIEQISEFSKRVILADANLDKVLSAYNKH |
| | | RDKPIREQAENIIHLFTLTNLGAPAAFKYFDTTIDRKQYRSTKEVLDA |
| | | TLIHQSITGLYETRIDLSQLGGDEGADKRTADGSEFESPKKKRKV |
| 09. | 1444 | MSEVEFSHEYWMRHALTLAKRARDEREVPVGAVLVLNNRVIGEGW |
| monoABE8.1_ | | NRAIGLHDPTAHAEIMALRQGGLVMQNYRLYDATLYVTFEPCVMCA |
| bpNLS + | | GAMIHSRIGRVVFGVRNAKTGAAGSLMDVLHYPGMNHRVEITEGIL |
| Y147R_Q154R_ | | ADECAALLCRFFRMPRRVFNAQKKAQSSTDSGGSSGGSSGSETP |
| I76Y polypeptide | | GTSESATPESSGGSSGGSDKKYSIGLAIGTNSVGWAVITDEYKVPS |
| sequence | | KKFKVLGNTDRHSIKKNLIGALLFDSGETAEATRLKRTARRRYTRRK |
| | | NRICYLQEIFSNEMAKVDDSFFHRLEESFLVEEDKKHERHPIFGNIV |
| | | DEVAYHEKYPTIYHLRKKLVDSTDKADLRLIYLALAHMIKFRGHFLIE |
| | | GDLNPDNSDVDKLFIQLVQTYNQLFEENPINASGVDAKAILSARLSK |
| | | SRRLENLIAQLPGEKKNGLFGNLIALSLGLTPNFKSNFDLAEDAKLQ |
| | | LSKDTYDDDLDNLLAQIGDQYADLFLAAKNLSDAILLSDILRVNTEITK |
| | | APLSASMIKRYDEHHQDLTLLKALVRQQLPEKYKEIFFDQSKNGYA |
| | | GYIDGGASQEEFYKFIKPILEKMDGTEELLVKLNREDLLRKQRTFDN |
| | | GSIPHQIHLGELHAILRRQEDFYPFLKDNREKIEKILTFRIPYYVGPLA |
| | | RGNSRFAWMTRKSEETITPWNFEEVVDKGASAQSFIERMTNFDKN |
| | | LPNEKVLPKHSLLYEYFTVYNELTKVKYVTEGMRKPAFLSGEQKKAI |
| | | VDLLFKTNRKVTVKQLKEDYFKKIECFDSVEISGVEDRFNASLGTYH |
| | | DLLKIIKDKDFLDNEENEDILEDIVLTLTLFEDREMIEERLKTYAHLFD |
| | | DKVMKQLKRRRYTGWGRLSRKLINGIRDKQSGKTILDFLKSDGFAN |
| | | RNFMQLIHDDSLTFKEDIQKAQVSGQGDSLHEHIANLAGSPAIKKGI |
| | | LQTVKVVDELVKVMGRHKPENIVIEMARENQTTQKGQKNSRERMK |
| | | RIEEGIKELGSQILKEHPVENTQLQNEKLYLYYLQNGRDMYVDQEL |
| | | DINRLSDYDVDHIVPQSFLKDDSIDNKVLTRSDKNRGKSDNVPSEE |
| | | VVKKMKNYWRQLLNAKLITQRKFDNLTKAERGGLSELDKAGFIKRQ |
| | | LVETRQITKHVAQILDSRMNTKYDENDKLIREVKVITLKSKLVSDFRK |
| | | DFQFYKVREINNYHHAHDAYLNAVVGTALIKKYPKLESEFVYGDYK |
| | | VYDVRKMIAKSEQEIGKATAKYFFYSNIMNFFKTEITLANGEIRKRPLI |
| | | ETNGETGEIVWDKGRDFATVRKVLSMPQVNIVKKTEVQTGGFSKE |
| | | SILPKRNSDKLIARKKDWDPKKYGGFVSPTVAYSVLVVAKVEKGKS |
| | | KKLKSVKELLGITIMERSSFEKNPIDFLEAKGYKEVKKDLIIKLPKYSL |
| | | FELENGRKRMLASARELQKGNELALPSKYVNFLYLASHYEKLKGSP |
| | | EDNEQKQLFVEQHKHYLDEIIEQISEFSKRVILADANLDKVLSAYNKH |
| | | RDKPIREQAENIIHLFTLTNLGAPAAFKYFDTTIDRKQYRSTKEVLDA |
| | | TLIHQSITGLYETRIDLSQLGGDEGADKRTADGSEFESPKKKRKV |
| 10. | 1445 | MSEVEFSHEYWMRHALTLAKRARDEREVPVGAVLVLNNRVIGEGW |
| monoABE8.1_ | | NRAIGLHDPTAHAEIMALRQGGLVMQNYRLIDATLYVTFEPCVMCA |
| bpNLS + | | GAMIHSRIGRVVFGVRNAKTGAAGSLMDVLHYPGMNHRVEITEGIL |
| Y147R_Q154R_ | | ADECAALLCRFFRMPRRVFNAQKKAQSSRDSGGSSGGSSGSETP |
| T166R polypeptide | | GTSESATPESSGGSSGGSDKKYSIGLAIGTNSVGWAVITDEYKVPS |
| sequence | | KKFKVLGNTDRHSIKKNLIGALLFDSGETAEATRLKRTARRRYTRRK |
| | | NRICYLQEIFSNEMAKVDDSFFHRLEESFLVEEDKKHERHPIFGNIV |
| | | DEVAYHEKYPTIYHLRKKLVDSTDKADLRLIYLALAHMIKFRGHFLIE |
| | | GDLNPDNSDVDKLFIQLVQTYNQLFEENPINASGVDAKAILSARLSK |
| | | SRRLENLIAQLPGEKKNGLFGNLIALSLGLTPNFKSNFDLAEDAKLQ |
| | | LSKDTYDDDLDNLLAQIGDQYADLFLAAKNLSDAILLSDILRVNTEITK |
| | | APLSASMIKRYDEHHQDLTLLKALVRQQLPEKYKEIFFDQSKNGYA |
| | | GYIDGGASQEEFYKFIKPILEKMDGTEELLVKLNREDLLRKQRTFDN |
| | | GSIPHQIHLGELHAILRRQEDFYPFLKDNREKIEKILTFRIPYYVGPLA |
| | | RGNSRFAWMTRKSEETITPWNFEEVVDKGASAQSFIERMTNFDKN |
| | | LPNEKVLPKHSLLYEYFTVYNELTKVKYVTEGMRKPAFLSGEQKKAI |
| | | VDLLFKTNRKVTVKQLKEDYFKKIECFDSVEISGVEDRFNASLGTYH |
| | | DLLKIIKDKDFLDNEENEDILEDIVLTLTLFEDREMIEERLKTYAHLFD |
| | | DKVMKQLKRRRYTGWGRLSRKLINGIRDKQSGKTILDFLKSDGFAN |
| | | RNFMQLIHDDSLTFKEDIQKAQVSGQGDSLHEHIANLAGSPAIKKGI |
| | | LQTVKVVDELVKVMGRHKPENIVIEMARENQTTQKGQKNSRERMK |
| | | RIEEGIKELGSQILKEHPVENTQLQNEKLYLYYLQNGRDMYVDQEL |
| | | DINRLSDYDVDHIVPQSFLKDDSIDNKVLTRSDKNRGKSDNVPSEE |
| | | VVKKMKNYWRQLLNAKLITQRKFDNLTKAERGGLSELDKAGFIKRQ |
| | | LVETRQITKHVAQILDSRMNTKYDENDKLIREVKVITLKSKLVSDFRK |
| | | DFQFYKVREINNYHHAHDAYLNAVVGTALIKKYPKLESEFVYGDYK |
| | | VYDVRKMIAKSEQEIGKATAKYFFYSNIMNFFKTEITLANGEIRKRPLI |
| | | ETNGETGEIVWDKGRDFATVRKVLSMPQVNIVKKTEVQTGGFSKE |
| | | SILPKRNSDKLIARKKDWDPKKYGGFVSPTVAYSVLVVAKVEKGKS |
| | | KKLKSVKELLGITIMERSSFEKNPIDFLEAKGYKEVKKDLIIKLPKYSL |
| | | FELENGRKRMLASARELQKGNELALPSKYVNFLYLASHYEKLKGSP |
| | | EDNEQKQLFVEQHKHYLDEIIEQISEFSKRVILADANLDKVLSAYNKH |
| | | RDKPIREQAENIIHLFTLTNLGAPAAFKYFDTTIDRKQYRSTKEVLDA |
| | | TLIHQSITGLYETRIDLSQLGGDEGADKRTADGSEFESPKKKRKV |
| 11. | 1446 | MSEVEFSHEYWMRHALTLAKRARDEREVPVGAVLVLNNRVIGEGW |
| monoABE8.1_ | | NRAIGLHDPTAHAEIMALRQGGLVMQNYRLIDATLYVTFEPCVMCA |
| bpNLS + | | GAMIHSRIGRVVFGVRNAKTGAAGSLMDVLHYPGMNHRVEITEGIL |
| Y147T_Q154R | | ADECAALLCTFFRMPRRVFNAQKKAQSSTDSGGSSGGSSGSETP |
| polypeptide | | GTSESATPESSGGSSGGSDKKYSIGLAIGTNSVGWAVITDEYKVPS |
| sequence | | KKFKVLGNTDRHSIKKNLIGALLFDSGETAEATRLKRTARRRYTRRK |
| | | NRICYLQEIFSNEMAKVDDSFFHRLEESFLVEEDKKHERHPIFGNIV |
| | | DEVAYHEKYPTIYHLRKKLVDSTDKADLRLIYLALAHMIKFRGHFLIE |
| | | GDLNPDNSDVDKLFIQLVQTYNQLFEENPINASGVDAKAILSARLSK |
| | | SRRLENLIAQLPGEKKNGLFGNLIALSLGLTPNFKSNFDLAEDAKLQ |
| | | LSKDTYDDDLDNLLAQIGDQYADLFLAAKNLSDAILLSDILRVNTEITK |
| | | APLSASMIKRYDEHHQDLTLLKALVRQQLPEKYKEIFFDQSKNGYA |
| | | GYIDGGASQEEFYKFIKPILEKMDGTEELLVKLNREDLLRKQRTFDN |
| | | GSIPHQIHLGELHAILRRQEDFYPFLKDNREKIEKILTFRIPYYVGPLA |
| | | RGNSRFAWMTRKSEETITPWNFEEVVDKGASAQSFIERMTNFDKN |
| | | LPNEKVLPKHSLLYEYFTVYNELTKVKYVTEGMRKPAFLSGEQKKAI |
| | | VDLLFKTNRKVTVKQLKEDYFKKIECFDSVEISGVEDRFNASLGTYH |
| | | DLLKIIKDKDFLDNEENEDILEDIVLTLTLFEDREMIEERLKTYAHLFD |
| | | DKVMKQLKRRRYTGWGRLSRKLINGIRDKQSGKTILDFLKSDGFAN |
| | | RNFMQLIHDDSLTFKEDIQKAQVSGQGDSLHEHIANLAGSPAIKKGI |
| | | LQTVKVVDELVKVMGRHKPENIVIEMARENQTTQKGQKNSRERMK |
| | | RIEEGIKELGSQILKEHPVENTQLQNEKLYLYYLQNGRDMYVDQEL |
| | | DINRLSDYDVDHIVPQSFLKDDSIDNKVLTRSDKNRGKSDNVPSEE |
| | | VVKKMKNYWRQLLNAKLITQRKFDNLTKAERGGLSELDKAGFIKRQ |
| | | LVETRQITKHVAQILDSRMNTKYDENDKLIREVKVITLKSKLVSDFRK |
| | | DFQFYKVREINNYHHAHDAYLNAVVGTALIKKYPKLESEFVYGDYK |
| | | VYDVRKMIAKSEQEIGKATAKYFFYSNIMNFFKTEITLANGEIRKRPLI |
| | | ETNGETGEIVWDKGRDFATVRKVLSMPQVNIVKKTEVQTGGFSKE |
| | | SILPKRNSDKLIARKKDWDPKKYGGFVSPTVAYSVLVVAKVEKGKS |
| | | KKLKSVKELLGITIMERSSFEKNPIDFLEAKGYKEVKKDLIIKLPKYSL |
| | | FELENGRKRMLASARELQKGNELALPSKYVNFLYLASHYEKLKGSP |
| | | EDNEQKQLFVEQHKHYLDEIIEQISEFSKRVILADANLDKVLSAYNKH |
| | | RDKPIREQAENIIHLFTLTNLGAPAAFKYFDTTIDRKQYRSTKEVLDA |
| | | TLIHQSITGLYETRIDLSQLGGDEGADKRTADGSEFESPKKKRKV |
| 12. | 1447 | MSEVEFSHEYWMRHALTLAKRARDEREVPVGAVLVLNNRVIGEGW |
| monoABE8.1_ | | NRAIGLHDPTAHAEIMALRQGGLVMQNYRLIDATLYVTFEPCVMCA |
| bpNLS + | | GAMIHSRIGRVVFGVRNAKTGAAGSLMDVLHYPGMNHRVEITEGIL |
| Y147T_Q154S | | ADECAALLCTFFRMPRSVFNAQKKAQSSTDSGGSSGGSSGSETP |
| polypeptide | | GTSESATPESSGGSSGGSDKKYSIGLAIGTNSVGWAVITDEYKVPS |
| sequence | | KKFKVLGNTDRHSIKKNLIGALLFDSGETAEATRLKRTARRRYTRRK |
| | | NRICYLQEIFSNEMAKVDDSFFHRLEESFLVEEDKKHERHPIFGNIV |
| | | DEVAYHEKYPTIYHLRKKLVDSTDKADLRLIYLALAHMIKFRGHFLIE |
| | | GDLNPDNSDVDKLFIQLVQTYNQLFEENPINASGVDAKAILSARLSK |
| | | SRRLENLIAQLPGEKKNGLFGNLIALSLGLTPNFKSNFDLAEDAKLQ |
| | | LSKDTYDDDLDNLLAQIGDQYADLFLAAKNLSDAILLSDILRVNTEITK |
| | | APLSASMIKRYDEHHQDLTLLKALVRQQLPEKYKEIFFDQSKNGYA |
| | | GYIDGGASQEEFYKFIKPILEKMDGTEELLVKLNREDLLRKQRTFDN |
| | | GSIPHQIHLGELHAILRRQEDFYPFLKDNREKIEKILTFRIPYYVGPLA |
| | | RGNSRFAWMTRKSEETITPWNFEEVVDKGASAQSFIERMTNFDKN |
| | | LPNEKVLPKHSLLYEYFTVYNELTKVKYVTEGMRKPAFLSGEQKKAI |
| | | VDLLFKTNRKVTVKQLKEDYFKKIECFDSVEISGVEDRFNASLGTYH |
| | | DLLKIIKDKDFLDNEENEDILEDIVLTLTLFEDREMIEERLKTYAHLFD |
| | | DKVMKQLKRRRYTGWGRLSRKLINGIRDKQSGKTILDFLKSDGFAN |
| | | RNFMQLIHDDSLTFKEDIQKAQVSGQGDSLHEHIANLAGSPAIKKGI |
| | | LQTVKVVDELVKVMGRHKPENIVIEMARENQTTQKGQKNSRERMK |
| | | RIEEGIKELGSQILKEHPVENTQLQNEKLYLYYLQNGRDMYVDQEL |
| | | DINRLSDYDVDHIVPQSFLKDDSIDNKVLTRSDKNRGKSDNVPSEE |
| | | VVKKMKNYWRQLLNAKLITQRKFDNLTKAERGGLSELDKAGFIKRQ |
| | | LVETRQITKHVAQILDSRMNTKYDENDKLIREVKVITLKSKLVSDFRK |
| | | DFQFYKVREINNYHHAHDAYLNAVVGTALIKKYPKLESEFVYGDYK |
| | | VYDVRKMIAKSEQEIGKATAKYFFYSNIMNFFKTEITLANGEIRKRPLI |
| | | ETNGETGEIVWDKGRDFATVRKVLSMPQVNIVKKTEVQTGGFSKE |
| | | SILPKRNSDKLIARKKDWDPKKYGGFVSPTVAYSVLVVAKVEKGKS |
| | | KKLKSVKELLGITIMERSSFEKNPIDFLEAKGYKEVKKDLIIKLPKYSL |
| | | FELENGRKRMLASARELQKGNELALPSKYVNFLYLASHYEKLKGSP |
| | | EDNEQKQLFVEQHKHYLDEIIEQISEFSKRVILADANLDKVLSAYNKH |
| | | RDKPIREQAENIIHLFTLTNLGAPAAFKYFDTTIDRKQYRSTKEVLDA |
| | | TLIHQSITGLYETRIDLSQLGGDEGADKRTADGSEFESPKKKRKV |
| 13. | 1448 | MSEVEFSHEYWMRHALTLAKRARDEREVPVGAVLVLNNRVIGEGW |
| monoABE8.1_ | | NRAIGLHDPTAHAEIMALRQGGLVMQNYRLYDATLYVTFEPCVMCA |
| bpNLS + | | GAMIHSRIGRVVFGVRNAKTGAAGSLMDVLHHPGMNHRVEITEGIL |
| H123Y123H_Y147R_ | | ADECAALLCRFFRMPRRVFNAQKKAQSSTDSGGSSGGSSGSETP |
| Q154R_I76Y | | GTSESATPESSGGSSGGSDKKYSIGLAIGTNSVGWAVITDEYKVPS |
| polypeptide | | KKFKVLGNTDRHSIKKNLIGALLFDSGETAEATRLKRTARRRYTRRK |
| sequence | | NRICYLQEIFSNEMAKVDDSFFHRLEESFLVEEDKKHERHPIFGNIV |
| | | DEVAYHEKYPTIYHLRKKLVDSTDKADLRLIYLALAHMIKFRGHFLIE |
| | | GDLNPDNSDVDKLFIQLVQTYNQLFEENPINASGVDAKAILSARLSK |
| | | SRRLENLIAQLPGEKKNGLFGNLIALSLGLTPNFKSNFDLAEDAKLQ |
| | | LSKDTYDDDLDNLLAQIGDQYADLFLAAKNLSDAILLSDILRVNTEITK |
| | | APLSASMIKRYDEHHQDLTLLKALVRQQLPEKYKEIFFDQSKNGYA |
| | | GYIDGGASQEEFYKFIKPILEKMDGTEELLVKLNREDLLRKQRTFDN |
| | | GSIPHQIHLGELHAILRRQEDFYPFLKDNREKIEKILTFRIPYYVGPLA |
| | | RGNSRFAWMTRKSEETITPWNFEEVVDKGASAQSFIERMTNFDKN |
| | | LPNEKVLPKHSLLYEYFTVYNELTKVKYVTEGMRKPAFLSGEQKKAI |
| | | VDLLFKTNRKVTVKQLKEDYFKKIECFDSVEISGVEDRFNASLGTYH |
| | | DLLKIIKDKDFLDNEENEDILEDIVLTLTLFEDREMIEERLKTYAHLFD |
| | | DKVMKQLKRRRYTGWGRLSRKLINGIRDKQSGKTILDFLKSDGFAN |
| | | RNFMQLIHDDSLTFKEDIQKAQVSGQGDSLHEHIANLAGSPAIKKGI |
| | | LQTVKVVDELVKVMGRHKPENIVIEMARENQTTQKGQKNSRERMK |
| | | RIEEGIKELGSQILKEHPVENTQLQNEKLYLYYLQNGRDMYVDQEL |
| | | DINRLSDYDVDHIVPQSFLKDDSIDNKVLTRSDKNRGKSDNVPSEE |
| | | VVKKMKNYWRQLLNAKLITQRKFDNLTKAERGGLSELDKAGFIKRQ |
| | | LVETRQITKHVAQILDSRMNTKYDENDKLIREVKVITLKSKLVSDFRK |
| | | DFQFYKVREINNYHHAHDAYLNAVVGTALIKKYPKLESEFVYGDYK |
| | | VYDVRKMIAKSEQEIGKATAKYFFYSNIMNFFKTEITLANGEIRKRPLI |
| | | ETNGETGEIVWDKGRDFATVRKVLSMPQVNIVKKTEVQTGGFSKE |
| | | SILPKRNSDKLIARKKDWDPKKYGGFVSPTVAYSVLVVAKVEKGKS |
| | | KKLKSVKELLGITIMERSSFEKNPIDFLEAKGYKEVKKDLIIKLPKYSL |
| | | FELENGRKRMLASARELQKGNELALPSKYVNFLYLASHYEKLKGSP |
| | | EDNEQKQLFVEQHKHYLDEIIEQISEFSKRVILADANLDKVLSAYNKH |
| | | RDKPIREQAENIIHLFTLTNLGAPAAFKYFDTTIDRKQYRSTKEVLDA |
| | | TLIHQSITGLYETRIDLSQLGGDEGADKRTADGSEFESPKKKRKV |
| 14. | 1449 | MSEVEFSHEYWMRHALTLAKRARDEREVPVGAVLVLNNRVIGEGW |
| monoABE8.1_bpN | | NRAIGLHDPTAHAEIMALRQGGLVMQNYRLIDATLYSTFEPCVMCA |
| LS + V82S + | | GAMIHSRIGRVVFGVRNAKTGAAGSLMDVLHYPGMNHRVEITEGIL |
| Q154R polypeptide | | ADECAALLCYFFRMPRRVFNAQKKAQSSTDSGGSSGGSSGSETP |
| sequence | | GTSESATPESSGGSSGGSDKKYSIGLAIGTNSVGWAVITDEYKVPS |
| | | KKFKVLGNTDRHSIKKNLIGALLFDSGETAEATRLKRTARRRYTRRK |
| | | NRICYLQEIFSNEMAKVDDSFFHRLEESFLVEEDKKHERHPIFGNIV |
| | | DEVAYHEKYPTIYHLRKKLVDSTDKADLRLIYLALAHMIKFRGHFLIE |
| | | GDLNPDNSDVDKLFIQLVQTYNQLFEENPINASGVDAKAILSARLSK |
| | | SRRLENLIAQLPGEKKNGLFGNLIALSLGLTPNFKSNFDLAEDAKLQ |
| | | LSKDTYDDDLDNLLAQIGDQYADLFLAAKNLSDAILLSDILRVNTEITK |
| | | APLSASMIKRYDEHHQDLTLLKALVRQQLPEKYKEIFFDQSKNGYA |
| | | GYIDGGASQEEFYKFIKPILEKMDGTEELLVKLNREDLLRKQRTFDN |
| | | GSIPHQIHLGELHAILRRQEDFYPFLKDNREKIEKILTFRIPYYVGPLA |
| | | RGNSRFAWMTRKSEETITPWNFEEVVDKGASAQSFIERMTNFDKN |
| | | LPNEKVLPKHSLLYEYFTVYNELTKVKYVTEGMRKPAFLSGEQKKAI |
| | | VDLLFKTNRKVTVKQLKEDYFKKIECFDSVEISGVEDRFNASLGTYH |
| | | DLLKIIKDKDFLDNEENEDILEDIVLTLTLFEDREMIEERLKTYAHLFD |
| | | DKVMKQLKRRRYTGWGRLSRKLINGIRDKQSGKTILDFLKSDGFAN |
| | | RNFMQLIHDDSLTFKEDIQKAQVSGQGDSLHEHIANLAGSPAIKKGI |
| | | LQTVKVVDELVKVMGRHKPENIVIEMARENQTTQKGQKNSRERMK |
| | | RIEEGIKELGSQILKEHPVENTQLQNEKLYLYYLQNGRDMYVDQEL |
| | | DINRLSDYDVDHIVPQSFLKDDSIDNKVLTRSDKNRGKSDNVPSEE |
| | | VVKKMKNYWRQLLNAKLITQRKFDNLTKAERGGLSELDKAGFIKRQ |
| | | LVETRQITKHVAQILDSRMNTKYDENDKLIREVKVITLKSKLVSDFRK |
| | | DFQFYKVREINNYHHAHDAYLNAVVGTALIKKYPKLESEFVYGDYK |
| | | VYDVRKMIAKSEQEIGKATAKYFFYSNIMNFFKTEITLANGEIRKRPLI |
| | | ETNGETGEIVWDKGRDFATVRKVLSMPQVNIVKKTEVQTGGFSKE |
| | | SILPKRNSDKLIARKKDWDPKKYGGFVSPTVAYSVLVVAKVEKGKS |
| | | KKLKSVKELLGITIMERSSFEKNPIDFLEAKGYKEVKKDLIIKLPKYSL |
| | | FELENGRKRMLASARELQKGNELALPSKYVNFLYLASHYEKLKGSP |
| | | EDNEQKQLFVEQHKHYLDEIIEQISEFSKRVILADANLDKVLSAYNKH |
| | | RDKPIREQAENIIHLFTLTNLGAPAAFKYFDTTIDRKQYRSTKEVLDA |
| | | TLIHQSITGLYETRIDLSQLGGDEGADKRTADGSEFESPKKKRKV |
| Linker | 65 | PAPAP |
| Linker | 66 | PAPAPA |
| Linker | 67 | PAPAPAP |
| Linker | 68 | PAPAPAPA |
| Linker | 69 | P(AP)4 |
| Linker | 70 | P(AP)7 |
| Linker | 71 | P(AP)10 |
| N gene (nucleic | 4001 | atggatgccgacaagattgtattcaaagtcaataatcaggtggtctctttgaagcctgagattatc |
| acid) | | gtggatcaatatgagtacaagtaccctgccatcaaagatttgaaaaagccctgtataaccctag |
| | | gaaaggctcccgatttaaataaagcatacaagtcagttttgtcaggcatgagcgccgccaaac |
| | | ttaatcctgacgatgtatgttcctatttggcagcggcaatgcagttttttgaggggacatgtccgga |
| | | agactggaccagctatggaattgtgattgcacgaaaaggagataagatcaccccaggttctct |
| | | ggtggagataaaacgtactgatgtagaagggaattgggctctgacaggaggcatggaactga |
| | | caagagaccccactgtccctgagcatgcgtccttagtcggtcttctcttgagtctgtataggttgag |
| | | caaaatatccgggcaaaacactggtaactataagacaaacattgcagacaggatagagcag |
| | | atttttgagacagccccttttgttaaaatcgtggaacaccatactctaatgacaactcacaaaatg |
| | | tgtgctaattggagtactataccaaacttcagatttttggccggaacctatgacatgtttttctcccg |
| | | gattgagcatctatattcagcaatcagagtgggcacagttgtcactgcttatgaagactgttcagg |
| | | actggtatcatttactgggttcataaaacaaatcaatctcaccgctagagaggcaatactatattt |
| | | cttccacaagaactttgaggaagagataagaagaatgtttgagccagggcaggagacagct |
| | | gttcctcactcttatttcatccacttccgttcactaggcttgagtgggaaatctccttattcatcaaa |
| | | tgctgttggtcacgtgttcaatctcattcactttgtaggatgctatatgggtcaagtcagatccctaa |
| | | atgcaacggttattgctgcatgtgctcctcatgaaatgtctgttctagggggctatctgggagaggaa |
| | | ttcttcgggaaagggacatttgaaagaagattcttcagagatgagaaagaacttcaagaatac |
| | | gaggcggctgaactgacaaagactgacgtagcactggcagatgatggaactgtcaactctga |
| | | cgacgaggactacttttcaggtgaaaccagaagtccggaggctgtttatactcgaatcatgatg |
| | | aatggaggtcgactaaagagatctcacatacggagatatgtctcagtcagttccaatcatcaag |
| | | cccgtccaaactcattcgccgagtttctaaacaagacatattcgagtgactca |
| N gene (amino | 4002 | MDADKIVFKVNNQVVSLKPEIIVDQYEYKYPAIKDLKKPCITLGKAPD |
| acid) | | LNKAYKSVLSGMSAAKLNPDDVCSYLAAAMQFFEGTCPEDWTSYG |
| | | IVIARKGDKITPGSLVEIKRTDVEGNWALTGGMELTRDPTVPEHASL |
| | | VGLLLSLYRLSKISGQNTGNYKTNIADRIEQIFETAPFVKIVEHHTLMT |
| | | THKMCANWSTIPNFRFLAGTYDMFFSRIEHLYSAIRVGTVVTAYED |
| | | CSGLVSFTGFIKQINLTAREAILYFFHKNFEEEIRRMFEPGQETAVPH |
| | | SYFIHFRSLGLSGKSPYSSNAVGHVFNLIHFVGCYMGQVRSLNATVI |
| | | AACAPHEMSVLGGYLGEEFFGKGTFERRFFRDEKELQEYEAAELT |
| | | KTDVALADDGTVNSDDEDYFSGETRSPEAVYTRIMMNGGRLKRSH |
| | | IRRYVSVSSNHQARPNSFAEFLNKTYSSDS |
| L gene (nucleic | 4003 | ctcgatcctggagaggtctatgatgaccctattgacccaatcgagttagaggctgaacccagag |
| acid) | | gaacccccattgtccccaacatcttgaggaactctgactacaatctcaactctcctttgatagaag |
| | | atcctgctagactaatgttagaatggttaaaaacagggaatagaccttatcggatgactctaaca |
| | | gacaattgctccaggtctttcagagttttgaaagattatttcaagaaggtagatttgggttctctcaa |
| | | ggtgggcggaatggctgcacagtcaatgatttctctctggttatatggtgcccactctgaatccaa |
| | | caggagccggagatgtataacagacttggcccatttctattccaagtcgtcccccatagagaag |
| | | ctgttgaatctcacgctaggaaatagagggctgagaatccccccagagggagtgttaagttgc |
| | | cttgagagggttgattatgataatgcatttggaaggtatcttgccaacacgtattcctcttacttgtt |
| | | cttccatgtaatcaccttatacatgaacgccctagactgggatgaagaaaagaccatcctagcatt |
| | | atggaaagatttaacctcagtggacatcgggaaggacttggtaaagttcaaagaccaaatatg |
| | | gggactgctgatcgtgacaaaggactttgtttactcccaaagttccaattgtctttttgacagaaac |
| | | tacacacttatgctaaaagatcttttcttgtctcgcttcaactccttaatggtcttgctctctccccc |
| | | agagccccgatactcagatgacttgatatctcaactatgccagctgtacattgctggggatcaagtct |
| | | tgtctatgtgtggaaactccggctatgaagtcatcaaaatattggagccatatgtcgtgaatagttt |
| | | agtccagagagcagaaaagtttaggcctctcattcattccttgggagactttcctgtatttataaaa |
| | | gacaaggtaagtcaacttgaagagacgttcggtccctgtgcaagaaggttctttagggctctgg |
| | | atcaattcgacaacatacatgacttggtttttgtgtttggctgttacaggcattgggggcacccatat |
| | | atagattatcgaaagggtctgtcaaaactatatgatcaggttcaccttaaaaaaatgatagataa |
| | | gtcctaccaggagtgcttagcaagcgacctagccaggaggatccttagatggggttttgataag |
| | | tactccaagtggtatctggattcaagattcctagcccgagaccaccccttgactccttatatcaaa |
| | | acccaaacatggccacccaaacatattgtagacttggtgggggatacatggcacaagctccc |
| | | gatcacgcagatctttgagattcctgaatcaatggatccgtcagaaatattggatgacaaatcac |
| | | attctttcaccagaacgagactagcttcttggctgtcagaaaaccgaggggggcctgttcctagc |
| | | gaaaaagttattatcacggccctgtctaagccgcctgtcaatccccgagagtttctgaggtctata |
| | | gacctoggaggattgccagatgaagacttgataattggcctcaagccaaaggaacgggaatt |
| | | gaagattgaaggtcgattctttgctctaatgtcatggaatctaagattgtattttgtcatcactgaaa |
| | | aactcttggccaactacatcttgccactttttgacgcgctgactatgacagacaacctgaacaag |
| | | gtgtttaaaaagctgatcgacagggtcaccgggcaagggcttttggactattcaagggtcacat |
| | | atgcatttcacctggactatgaaaagtggaacaaccatcaaagattagagtcaacagaggatg |
| | | tattttctgtcctagatcaagtgtttggattgaagagagtgttttctagaacacacgagttttttcaaa |
| | | aggcctggatctattattcagacagatcagacctcatcgggttacgggaggatcaaatatactg |
| | | cttagatgcgtccaacggcccaacctgttggaatggccaggatggcgggctagaaggcttacg |
| | | gcagaagggctggagtctagtcagcttattgatgatagatagagaatctcaaatcaggaacac |
| | | aagaaccaaaatactagctcaaggagacaaccaggttttatgtccgacatacatgttgtcgcc |
| | | agggctatctcaagaggggctcctctatgaattggagagaatatcaaggaatgcactttcgatat |
| | | acagagccgtcgaggaaggggcatctaagctagggctgatcatcaagaaagaagagacca |
| | | tgtgtagttatgacttcctcatctatggaaaaacccctttgtttagaggtaacatattggtgcctgagt |
| | | ccaaaagatgggccagagtctcttgcgtctctaatgaccaaatagtcaacctcgccaatataat |
| | | gtcgacagtgtccaccaatgcgctaacagtggcacaacactctcaatctttgatcaaaccgatg |
| | | agggattttctgctcatgtcagtacaggcagtctttcactacctgctatttagcccaatcttaaaggg |
| | | aagagtttacaagattctgagcgctgaaggggagagctttctcctagccatgtcaaggataatct |
| | | atctagatccttctttgggagggatatctggaatgtccctcggaagattccatatacgacagttctc |
| | | agaccctgtctctgaagggttatccttctggagagagatctggttaagctcccaagagtcctgga |
| | | ttcacgcgttgtgtcaagaggctggaaacccagatcttggagagagaacactcgagagcttca |
| | | ctcgccttctagaagatccgaccaccttaaatatcagaggaggggccagtcctaccattctactc |
| | | aaggatgcaatcagaaaggctttatatgacgaggtggacaaggtggaaaattcagagtttcga |
| | | gaggcaatcctgttgtccaagacccatagagataattttatactcttcttaatatctgttgagcctct |
| | | gtttcctcgatttctcagtgagctattcagttcgtcttttttgggaatccccgagtcaatcattggat |
| | | tgatacaaaactcccgaacgataagaaggcagtttagaaagagtctctcaaaaactttagaaga |
| | | atccttctacaactcagagatccacgggattagtcggatgacccagacacctcagagggttgg |
| | | gggggtgtggccttgctcttcagagagggcagatctacttagggagatctcttggggaagaaa |
| | | agtggtaggcacgacagttcctcacccttctgagatgttgggattacttcccaagtcctctatttctt |
| | | gcacttgtggagcaacaggaggaggcaatcctagagtttctgtatcagtactcccgtcctttgatc |
| | | agtcatttttttcacgaggccccctaaagggatacttgggctcgtccacctctatgtcgacccagct |
| | | attccatgcatgggaaaaagtcactaatgttcatgtggtgaagagagctctatcgttaaaagaat |
| | | ctataaactggttcattactagagattccaacttggctcaagctctaattaggaacattatgtctctg |
| | | acaggccctgatttccctctagaggaggcccctgtcttcaaaaggacggggtcagccttgcata |
| | | ggttcaagtctgccagatacagcgaaggagggtattcttctgtctgcccgaacctcctctctcata |
| | | tttctgttagtacagacaccatgtctgatttgacccaagacgggaagaactacgatttcatgttcc |
| | | agccattgatgctttatgcacagacatggacatcagagctggtacagagagacacaaggcta |
| | | agagactctacgtttcattggcacctccgatgcaacaggtgtgtgagacccattgacgacgtga |
| | | ccctggagacctctcagatcttcgagtttccggatgtgtcgaaaagaatatccagaatggtttctg |
| | | gggctgtgcctcacttccagaggcttcccgatatccgtctgagaccaggagattttgaatctctaa |
| | | goggtagagaaaagtctcaccatatcggatcagctcaggggctcttatactcaatcttagtggc |
| | | aattcacgactcaggatacaatgatggaaccatcttccctgtcaacatatacggcaaggtttccc |
| | | ctagagactatttgagagggctcgcaaggggagtattgataggatcctcgatttgcttcttgacaa |
| | | gaatgacaaatatcaatattaatagacctcttgaattggtctcaggggtaatctcatatattctcctg |
| | | aggctagataaccatccctccttgtacataatgctcagagaaccgtctcttagaggagagatatt |
| | | ttctatccctcagaaaatccccgccgcttatccaaccactatgaaagaaggcaacagatcaatc |
| | | ttgtgttatctccaacatgtgctacgctatgagcgagagataatcacggcgtctccagagaatga |
| | | ctggctatggatcttttcagactttagaagtgccaaaatgacgtacctatccctcattacttaccagt |
| | | ctcatcttctactccagagggttgagagaaacctatctaagagtatgagagataacctgcgaca |
| | | attgagttctttgatgaggcaggtgctggggggcacggagaagataccttagagtcagacga |
| | | caacattcaacgactgctaaaagactctttacgaaggacaagatgggtggatcaagaggtgc |
| | | gccatgcagctagaaccatgactggagattacagccccaacaagaaggtgtcccgtaaggta |
| | | ggatgttcagaatgggtctgctctgctcaacaggttgcagtctctacctcagcaaacccggcccc |
| | | tgtctcggagcttgacataagggccctctctaagaggttccagaaccctttgatctcgggcttgag |
| | | agtggttcagtgggcaaccggtgctcattataagcttaagcctattctagatgatctcaatgttttcc |
| | | catctctctgccttgtagttggggacgggtcaggggggatatcaagggcagtcctcaacatgttt |
| | | ccagatgccaagcttgtgttcaacagtcttttagaggtgaatgacctgatggcttccggaacaca |
| | | tccactgcctccttcagcaatcatgaggggaggaaatgatatcgtctccagagtgatagatcttg |
| | | actcaatctgggaaaaaccgtccgacttgagaaacttggcaacctggaaatacttccagtcagt |
| | | ccaaaagcaggtcaacatgtcctatgacctcattatttgcgatgcagaagttactgacattgcatc |
| | | tatcaaccggatcaccctgttaatgtccgattttgcattgtctatagatggaccactctatttggtct |
| | | tcaaaacttatgggactatgctagtaaatccaaactacaaggctattcaacacctgtcaagagcgt |
| | | tcccctcggtcacagggtttatcacccaagtaacttcgtctttttcatctgagctctacctccgattc |
| | | tccaaacgagggaagtttttcagagatgctgagtacttgacctcttccacccttcgagaaatgagc |
| | | cttgtgttattcaattgtagcagccccaagagtgagatgcagagagctcgttccttgaactatcag |
| | | gatcttgtgagaggatttcctgaagaaatcatatcaaatccttacaatgagatgatcataactctg |
| | | attgacagtgatgtagaatcttttctagtccacaagatggttgatgatcttgagttacagagggga |
| | | actctgtctaaagtggctatcattatagccatcatgatagttttctccaacagagtcttcaacgtttcc |
| | | aaacccctaactgacccctcgttctatccaccgtctgatcccaaaatcctgaggcacttcaacat |
| | | atgttgcagtactatgatgtatctatctactgctttaggtgacgtccctagcttcgcaagacttcacg |
| | | acctgtataacagacctataacttattacttcagaaagcaagtcattcgagggaacgtttatctat |
| | | cttggagttggtccaacgacacctcagtgttcaaaagggtagcctgtaattctagcctgagtctgt |
| | | catctcactggatcaggttgatttacaagatagtgaagactaccagactcgttggcagcatcaa |
| | | ggatctatccagagaagtggaaagacaccttcataggtacaacaggtggatcaccctagagg |
| | | atatcagatctagatcatccctactagactacagttgcctg |
| L gene (amino | 4004 | LDPGEVYDDPIDPIELEAEPRGTPIVPNILRNSDYNLNSPLIEDPARL |
| acid) | | MLEWLKTGNRPYRMTLTDNCSRSFRVLKDYFKKVDLGSLKVGGMA |
| | | AQSMISLWLYGAHSESNRSRRCITDLAHFYSKSSPIEKLLNLTLGNR |
| | | GLRIPPEGVLSCLERVDYDNAFGRYLANTYSSYLFFHVITLYMNALD |
| | | WDEEKTILALWKDLTSVDIGKDLVKFKDQIWGLLIVTKDFVYSQSSN |
| | | CLFDRNYTLMLKDLFLSRFNSLMVLLSPPEPRYSDDLISQLCQLYIA |
| | | GDQVLSMCGNSGYEVIKILEPYVVNSLVQRAEKFRPLIHSLGDFPVF |
| | | IKDKVSQLEETFGPCARRFFRALDQFDNIHDLVFVFGCYRHWGHPY |
| | | IDYRKGLSKLYDQVHLKKMIDKSYQECLASDLARRILRWGFDKYSK |
| | | WYLDSRFLARDHPLTPYIKTQTWPPKHIVDLVGDTWHKLPITQIFEIP |
| | | ESMDPSEILDDKSHSFTRTRLASWLSENRGGPVPSEKVIITALSKPP |
| | | VNPREFLRSIDLGGLPDEDLIIGLKPKERELKIEGRFFALMSWNLRLY |
| | | FVITEKLLANYILPLFDALTMTDNLNKVFKKLIDRVTGQGLLDYSRVT |
| | | YAFHLDYEKWNNHQRLESTEDVFSVLDQVFGLKRVFSRTHEFFQK |
| | | AWIYYSDRSDLIGLREDQIYCLDASNGPTCWNGQDGGLEGLRQKG |
| | | WSLVSLLMIDRESQIRNTRTKILAQGDNQVLCPTYMLSPGLSQEGLL |
| | | YELERISRNALSIYRAVEEGASKLGLIIKKEETMCSYDFLIYGKTPLFR |
| | | GNILVPESKRWARVSCVSNDQIVNLANIMSTVSTNALTVAQHSQSLI |
| | | KPMRDFLLMSVQAVFHYLLFSPILKGRVYKILSAEGESFLLAMSRIIY |
| | | LDPSLGGISGMSLGRFHIRQFSDPVSEGLSFWREIWLSSQESWIHA |
| | | LCQEAGNPDLGERTLESFTRLLEDPTTLNIRGGASPTILLKDAIRKAL |
| | | YDEVDKVENSEFREAILLSKTHRDNFILFLISVEPLFPRFLSELFSSSF |
| | | LGIPESIIGLIQNSRTIRRQFRKSLSKTLEESFYNSEIHGISRMTQTPQ |
| | | RVGGVWPCSSERADLLREISWGRKVVGTTVPHPSEMLGLLPKSSI |
| | | SCTCGATGGGNPRVSVSVLPSFDQSFFSRGPLKGYLGSSTSMSTQ |
| | | LFHAWEKVTNVHVVKRALSLKESINWFITRDSNLAQALIRNIMSLTG |
| | | PDFPLEEAPVFKRTGSALHRFKSARYSEGGYSSVCPNLLSHISVST |
| | | DTMSDLTQDGKNYDFMFQPLMLYAQTWTSELVQRDTRLRDSTFH |
| | | WHLRCNRCVRPIDDVTLETSQIFEFPDVSKRISRMVSGAVPHFQRL |
| | | PDIRLRPGDFESLSGREKSHHIGSAQGLLYSILVAIHDSGYNDGTIFP |
| | | VNIYGKVSPRDYLRGLARGVLIGSSICFLTRMTNININRPLELVSGVIS |
| | | YILLRLDNHPSLYIMLREPSLRGEIFSIPQKIPAAYPTTMKEGNRSILC |
| | | YLQHVLRYEREIITASPENDWLWIFSDFRSAKMTYLSLITYQSHLLLQ |
| | | RVERNLSKSMRDNLRQLSSLMRQVLGGHGEDTLESDDNIQRLLKD |
| | | SLRRTRWDQEVRHAARTMTGDYSPNKKVSRKVGCSEWVCSAQ |
| | | QVAVSTSANPAPVSELDIRALSKRFQNPLISGLRVVQWATGAHYKL |
| | | KPILDDLNVFPSLCLVVGDGSGGISRAVLNMFPDAKLVFNSLLEVND |
| | | LMASGTHPLPPSAIMRGGNDIVSRVIDLDSIWEKPSDLRNLATWKYF |
| | | QSVQKQVNMSYDLIICDAEVTDIASINRITLLMSDFALSIDGPLYLVFK |
| | | TYGTMLVNPNYKAIQHLSRAFPSVTGFITQVTSSFSSELYLRFSKRG |
| | | KFFRDAEYLTSSTLREMSLVLFNCSSPKSEMQRARSLNYQDLVRG |
| | | FPEEIISNPYNEMIITLIDSDVESFLVHKMVDDLELQRGTLSKVAIIIAI |
| | | MIVFSNRVFNVSKPLTDPSFYPPSDPKILRHFNICCSTMMYLSTALG |
| | | DVPSFARLHDLYNRPITYYFRKQVIRGNVYLSWSWSNDTSVFKRVA |
| | | CNSSLSLSSHWIRLIYKIVKTTRLVGSIKDLSREVERHLHRYNRWITL |
| | | EDIRSRSSLLDYSCL |
| M gene (nucleic | 4005 | ttctagaagcagagaggaatctttgtcctcttcggacctttgtgtctgaagagacatgtcagacca |
| acid) | | tagttgacatgctctcgggttcatgttgatacaccagactctgccctggatatgacactgttttgcaa |
| | | tcactcttatttgcaatccgacgaactcagtatcatcatcccaagtgatctcctgagagtattccaa |
| | | ctcctccccttcaagagggcccctggaatcagcccactggaagataaaggttctcctcaatttgt |
| | | atacccagttcaggccctcagggactggagatcctgacaaagccagtccaataaccactttga |
| | | ctaacccgatcatcctatgattcccagaatatatctcgtcgaatgatttcagaatgtgccgcagga |
| | | tcctgaacgagtaaccattogggctacacactttaacccttccgttgatacaaaagttcctcatgtt |
| | | cttcttgcctgtaagttctttcagcgggacgtattcagggggtggaagccacaagtcatcgtcatc |
| | | cagaggggctgacgcgggagaggatttttgagtgtcctcgtccctgcggtttttcactatcttacgt |
| | | aggaggtt |
| M gene (amino | 4006 | NLLRKIVKNRRDEDTQKSSPASAPLDDDDLWLPPPEYVPLKELTGK |
| acid) | | KNMRNFCINGRVKVCSPNGYSFRILRHILKSFDEIYSGNHRMIGLVK |
| | | VVIGLALSGSPVPEGLNWYKLRRTFIFQWADSRGPLEGEELEYSQ |
| | | EITWDDDTEFVGLQIRVIAKQCHIQGRVWCINMNPRACQLWSDMSL |
| | | QTQRSEEDKDSSLLLE |
| P gene (nucleic | 4007 | agcaagatctttgtcaatcctagtgctattagagccggtctggccgatcttgagatggctgaaga |
| acid) | | aactgttgatctgatcaatagaaatatcgaagacaatcaggctcatctccaaggggaacccat |
| | | agaggtggacaatctccctgaggatatggggcgacttcacctggatgatggaaaatcgccca |
| | | accatggtgagatagccaaggtgggagaaggcaagtatcgagaggactttcagatggatga |
| | | aggagaggatcctagcttcctgttccagtcatacctggaaaatgttggagtccaaatagtcaga |
| | | caaatgaggtcaggagagagatttctcaagatatggtcacagaccgtagaagagattatatcc |
| | | tatgtcgcggtcaactttcccaaccctccaggaaagtcttcagaggataaatcaacccagacta |
| | | ctggccgagagctcaagaaggagacaacacccactccttctcagagagaaagccaatcatc |
| | | gaaagccaggatggcggctcaaattgcttctggccctccagcccttgaatggtcggctaccaat |
| | | gaagaggatgatctatcagtggaggctgagatcgctcaccagattgcagaaagtttctccaaa |
| | | aaatataagtttccctctcgatcctcagggatactcttgtataattttgagcaattgaaaatgaacct |
| | | tgatgatatagttaaagaggcaaaaaatgtaccaggtgtgacccgtttagcccatgacgggtcc |
| | | aaactccccctaagatgtgtactgggatgggtcgctttggccaactctaagaaattccagttgtta |
| | | gtcgaatccgacaagctgagtaaaatcatgcaagatgacttgaatcgctatacatcttgc |
| P gene (amino | 4008 | SKIFVNPSAIRAGLADLEMAEETVDLINRNIEDNQAHLQGEPIEVDNL |
| acid) | | PEDMGRLHLDDGKSPNHGEIAKVGEGKYREDFQMDEGEDPSFLF |
| | | QSYLENVGVQIVRQMRSGERFLKIWSQTVEEIISYVAVNFPNPPGK |
| | | SSEDKSTQTTGRELKKETTPTPSQRESQSSKARMAAQIASGPPALE |
| | | WSATNEEDDLSVEAEIAHQIAESFSKKYKFPSRSSGILLYNFEQLKM |
| | | NLDDIVKEAKNVPGVTRLAHDGSKLPLRCVLGWWVALANSKKFQLLV |
| | | ESDKLSKIMQDDLNRYTSC |
| G gene (nucleic | 4009 | atggttcctcaggctctcctgtttgtaccccttctggtttttccattgtgttttgggaaattcccta |
| acid) | | tttacacgataccagacaagcttggtccctggagtccgattgacatacatcacctcagctgcccaaac |
| | | aatttggtagtggaggacgaaggatgcaccaacctgtcagggttctcctacatggaacttaaagtt |
| | | ggatacatcttagccataaaagtgaacgggttcacttgcacaggcgttgtgacggaggctgaa |
| | | acctacactaacttcgttggttatgtcacaaccacgttcaaaagaaagcatttccgcccaacacc |
| | | agatgcatgtagagccgcgtacaactggaagatggccggtgaccccagatatgaagagtctc |
| | | tacacaatccgtaccctgactaccgctggcttcgaactgtaaaaaccaccaaggagtctctcgtt |
| | | atcatatctccaagtgtggcagatttggacccatatgacagatcccttcactcgagggtcttccct |
| | | agcgggaagtgctcaggagtagcggtgtcttctacctactgctccactaaccacgattacacca |
| | | tttggatgcccgagaatccgagactagggatgtcttgtgacatttttaccaatagtagagggaag |
| | | agagcatccaaagggagtgagacttgcggctttgtagatgaaagaggcctatataagtctttaa |
| | | aaggagcatgcaaactcaagttatgtggagttctaggacttagacttatggatggaacatgggt |
| | | ctcgatgcaaacatcaaatgaaaccaaatggtgccctcccgataagttggtgaacctgcacga |
| | | ctttcgctcagacgaaattgagcaccttgttgtagaggagttggtcaggaagagagaggagtgt |
| | | ctggatgcactagagtccatcatgacaaccaagtcagtgagtttcagacgtctcagtcatttaag |
| | | aaaacttgtccctgggtttggaaaagcatataccatattcaacaagaccttgatggaagccgat |
| | | gctcactacaagtcagtcagaacttggaatgagatcctcccttcaaaagggtgtttaagagttgg |
| | | ggggaggtgtcatcctcatgtgaacggggtgtttttcaatggtataatattaggacctgacggca |
| | | atgtcttaatcccagagatgcaatcatccctcctccagcaacatatggagttgttggaatcctcgg |
| | | ttatcccccttgtgcaccccctggcagacccgtctaccgttttcaaggacggtgacgaggctgag |
| | | gattttgttgaagttcaccttcccgatgtgcacaatcaggtctcaggagttgacttgggtctcccga |
| | | actgggggaagtatgtattactgagtgcaggggccctgactgccttgatgttgataattttcctgat |
| | | gacatgttgtagaagagtcaatcgatcagaacctacgcaacacaatctcagagggacaggg |
| | | agggaggtgtcagtcactccccaaagcgggaagatcatatcttcatgggaatcacacaagag |
| | | tgggggtgagaccagactg |
| G gene (amino | 4010 | MVPQALLFVPLLVFPLCFGKFPIYTIPDKLGPWSPIDIHHLSCPNNLV |
| acid) | | VEDEGCTNLSGFSYMELKVGYILAIKVNGFTCTGVVTEAETYTNFV |
| | | GYVTTTFKRKHFRPTPDACRAAYNWKMAGDPRYEESLHNPYPDY |
| | | RWLRTVKTTKESLVIISPSVADLDPYDRSLHSRVFPSGKCSGVAVS |
| | | STYCSTNHDYTIWMPENPRLGMSCDIFTNSRGKRASKGSETCGFV |
| | | DERGLYKSLKGACKLKLCGVLGLRLMDGTWVSMQTSNETKWCPP |
| | | DKLVNLHDFRSDEIEHLVVEELVRKREECLDALESIMTTKSVSFRRL |
| | | SHLRKLVPGFGKAYTIFNKTLMEADAHYKSVRTWNEILPSKGCLRV |
| | | GGRCHPHVNGVFFNGIILGPDGNVLIPEMQSSLLQQHMELLESSVIP |
| | | LVHPLADPSTVFKDGDEAEDFVEVHLPDVHNQVSGVDLGLPNWGK |
| | | YVLLSAGALTALMLIIFLMTCCRRVNRSEPTQHNLRGTGREVSVTP |
| | | QSGKIISSWESHKSGGETRL |
| HEK2-2 target | 4054 | gaacacaaagcatagactgc |

The application's sequence listing, which the Patent Office published only in electronic form, follows.

SEQUENCE LISTING (4054 sequences)

SEQ ID NO: 1-7 - skipped (7 entries)

SEQ ID NO: 8 - protein, 167 aa, synthetic construct
  REGION 1..167: note = Description of Artificial Sequence: Synthetic polypeptide
MSEVEFSHEYWMRHALTLAKRARDEREVPVGAVLVLNNRVIGEGWNRAIGLHDPTAHAEIMALRQGGLVMQNYRLIDATLYVTFEPCVMCAGAMIHSRIGRVVFGVRNAKTGAAGSLMDVLHYPGMNHRVEITEGILADECAALLCYFFRMPRQVFNAQKKAQSSTD

SEQ ID NO: 9-11 - skipped (3 entries)

SEQ ID NO: 12 - protein, 167 aa, synthetic construct
  REGION 1..167: note = Description of Artificial Sequence: Synthetic polypeptide
MSEVEFSHEYWMRHALTLAKRARDEREVPVGAVLVLNNRVIGEGWNRAIGLHDPTAHAEIMALRQGGLVMQNYRLIDATLYVTFEPCVMCAGAMIHSRIGRVVFGVRNAKTGAAGSLMDVLHYPGMNHRVEITEGILADECAALLCTFFRMPRQVFNAQKKAQSSTD

SEQ ID NO: 13-40 - skipped (28 entries)

SEQ ID NO: 41 - protein, 208 aa, Petromyzon marinus
MTDAEYVRIHEKLDIYTFKKQFFNNKKSVSHRCYVLFELKRRGERRACFWGYAVNKPQSGTERGIHAEIFSIRKVEEYLRDNPGQFTINWYSSWSPCADCAEKILEWYNQELRGNGHTLKIWACKLYYEKNARNQIGLWNLRDNGVGLNVMVSEHYQCCRKIFIQSSHNQLNENRWLEKTLKRAEKRRSELSIMIQVKILHTTKSPAV

SEQ ID NO: 42 - DNA, 766 bp, Petromyzon marinus
  source 1..766: mol_type = other DNA
tgacacgacacagccgtgtatatgaggaagggtagctggatggggggggggggaatacgttcagagaggacattagcgagcgtcttgttggtggccttgagtctagacacctgcagacatgaccgacgctgagtacgtgagaatccatgagaagttggacatctacacgtttaagaaacagtttttcaacaacaaaaaatccgtgtcgcatagatgctacgttctctttgaattaaaacgacggggtgaacgtagagcgtgtttttggggctatgctgtgaataaaccacagagcgggacagaacgtggaattcacgccgaaatctttagcattagaaaagtcgaagaatacctgcgcgacaaccccggacaattcacgataaattggtactcatcctggagtccttgtgcagattgcgctgaaaagatcttagaatggtataaccaggagctgcgggggaacggccacactttgaaaatctgggcttgcaaactctattacgagaaaaatgcgaggaatcaaattgggctgtggaacctcagagataacggggttgggttgaatgtaatggtaagtgaacactaccaatgttgcaggaaaatattcatccaatcgtcgcacaatcaattgaatgagaatagatggcttgagaagactttgaagcgagctgaaaaacgacggagcgagttgtccattatgattcaggtaaaaatactccacaccactaagagtcctgctgtttaagaggctatgcggatggttttc

SEQ ID NO: 43 - protein, 145 aa, Homo sapiens
MDSLLMNRRKFLYQFKNVRWAKGRRETYLCYVVKRRDSATSFSLDFGYLRNKNGCHVELLFLRYISDWDLDPGRCYRVTWFTSWSPCYDCARHVADFLRGNPNLSLRIFTARLYFCEDRKAEPEGLRRLHRAGVQIAIMTFKAPV

SEQ ID NO: 44 - DNA, 10681 bp, Homo sapiens
  source 1..10681: mol_type = other DNA
agagaaccatcattaattgaagtgagatttttctggcctgagacttgcagggaggcaagaagacactctggacaccactatggacaggtaaagaggcagtcttctcgtgggtgattgcactggccttcctctcagagcaaatctgagtaatgagactggtagctatccctttctctcatgtaactgtctgactgataagatcagcttgatcaatatgcatatatattttttgatctgtctccttttcttctattcagatcttatacgctgtcagcccaattctttctgtttcagacttctcttgatttccctctttttcatgtggcaaaagaagtagtgcgtacaatgtactgattcgtcctgagatttgtaccatggttgaaactaatttatggtaataatattaacatagcaaatctttagagactcaaatcatgaaaaggtaatagcagtactgtactaaaaacggtagtgctaattttcgtaataattttgtaaatattcaacagtaaaacaacttgaagacacactttcctagggaggcgttactgaaataatttagctatagtaagaaaatttgtaattttagaaatgccaagcattctaaattaattgcttgaaagtcactatgattgtgtccattataaggagacaaattcattcaagcaagttatttaatgttaaaggcccaattgttaggcagttaatggcacttttactattaactaatctttccatttgttcagacgtagcttaacttacctcttaggtgtgaatttggttaaggtcctcataatgtctttatgtgcagtttttgataggttattgtcatagaacttattctattcctacatttatgattactatggatgtatgagaataacacctaatccttatactttacctcaatttaactcctttataaagaacttacattacagaataaagattttttaaaaatatatttttttgtagagacagggtcttagcccagccgaggctggtctctaagtcctggcccaagcgatcctcctgcctgggcctcctaaagtgctggaattatagacatgagccatcacatccaatatacagaataaagatttttaatggaggatttaatgttcttcagaaaattttcttgaggtcagacaatgtcaaatgtctcctcagtttacactgagattttgaaaacaagtctgagctataggtccttgtgaagggtccattggaaatacttgttcaaagtaaaatggaaagcaaaggtaaaatcagcagttgaaattcagagaaagacagaaaaggagaaaagatgaaattcaacaggacagaagggaaatatattatcattaaggaggacagtatctgtagagctcattagtgatggcaaaatgacttggtcaggattatttttaacccgcttgtttctggtttgcacggctggggatgcagctagggttctgcctcagggagcacagctgtccagagcagctgtcagcctgcaagcctgaaacactccctcggtaaagtccttcctactcaggacagaaatgacgagaacagggagctggaaacaggcccctaaccagagaagggaagtaatggatcaacaaagttaactagcaggtcaggatcacgcaattcatttcactctgactggtaacatgtgacagaaacagtgtaggcttattgtattttcatgtagagtaggacccaaaaatccacccaaagtcctttatctatgccacatccttcttatctatacttccaggacactttttcttccttatgataaggctctctctctctccacacacacacacacacacacacacacacacacacacacacacacaaacacacaccccgccaaccaaggtgcatgtaaaaagatgtagattcctctgcctttctcatctacacagcccaggagggtaagttaatataagagggatttattggtaagagatgatgcttaatctgtttaacactgggcctcaaagagagaatttcttttcttctgtacttattaagcacctattatgtgttgagcttatatatacaaagggttattatatgctaatatagtaatagtaatggtggttggtactatggtaattaccataaaaattattatccttttaaaataaagctaattattattggatcttttttagtattcattttatgttttttatgtttttgattttttaaaagacaatctcaccctgttacccaggctggagtgcagtggtgcaatcatagctttctgcagtcttgaactcctgggctcaagcaatcctcctgccttggcctcccaaagtgttgggatacagtcatgagccactgcatctggcctaggatccatttagattaaaatatgcattttaaattttaaaataatatggctaatttttaccttatgtaatgtgtatactggcaataaatctagtttgctgcctaaagtttaaagtgctttccagtaagcttcatgtacgtgaggggagacatttaaagtgaaacagacagccaggtgtggtggctcacgcctgtaatcccagcactctgggaggctgaggtgggtggatcgcttgagccctggagttcaagaccagcctgagcaacatggcaaaacgctgtttctataacaaaaattagccgggcatggtggcatgtgcctgtggtcccagctactagggggctgaggcaggagaatcgttggagcccaggaggtcaaggctgcactgagcagtgcttgcgccactgcactccagcctgggtgacaggaccagaccttgcctcaaaaaaataagaagaaaaattaaaaataaatggaaacaactacaaagagctgttgtcctagatgagctacttagttaggctgatattttggtatttaacttttaaagtcagggtctgtcacctgcactacattattaaaatatcaattctcaatgtatatccacacaaagactggtacgtgaatgttcatagtacctttattcacaaaaccccaaagtagagactatccaaatatccatcaacaagtgaacaaataaacaaaatgtgctatatccatgcaatggaataccaccctgcagtacaaagaagctacttggggatgaatcccaaagtcatgacgctaaatgaaagagtcagacatgaaggaggagataatgtatgccatacgaaattctagaaaatgaaagtaacttatagttacagaaagcaaatcagggcaggcatagaggctcacacctgtaatcccagcactttgagaggccacgtgggaagattgctagaactcaggagttcaagaccagcctgggcaacacagtgaaactccattctccacaaaaatgggaaaaaaagaaagcaaatcagtggttgtcctgtggggaggggaaggactgcaaagagggaagaagctctggtggggtgagggtggtgattcaggttctgtatcctgactgtggtagcagtttggggtgtttacatccaaaaatattcgtagaattatgcatcttaaatgggtggagtttactgtatgtaaattatacctcaatgtaagaaaaaataatgtgtaagaaaactttcaattctcttgccagcaaacgttattcaaattcctgagccctttacttcgcaaattctctgcacttctgccccgtaccattaggtgacagcactagctccacaaattggataaatgcatttctggaaaagactagggacaaaatccaggcatcacttgtgctttcatatcaaccatgctgtacagcttgtgttgctgtctgcagctgcaatggggactcttgatttctttaaggaaacttgggttaccagagtatttccacaaatgctattcaaattagtgcttatgatatgcaagacactgtgctaggagccagaaaacaaagaggaggagaaatcagtcattatgtgggaacaacatagcaagatatttagatcattttgactagttaaaaaagcagcagagtacaaaatcacacatgcaatcagtataatccaaatcatgtaaatatgtgcctgtagaaagactagaggaataaacacaagaatcttaacagtcattgtcattagacactaagtctaattattattattagacactatgatatttgagatttaaaaaatctttaatattttaaaatttagagctcttctatttttccatagtattcaagtttgacaatgatcaagtattactctttctttttttttttttttttttttttttgagatggagttttggtcttgttgcccatgctggagtggaatggcatgaccatagctcactgcaacctccacctcctgggttcaagcaaagctgtcgcctcagcctcccgggtagatgggattacaggcgcccaccaccacactcggctaatgtttgtatttttagtagagatggggtttcaccatgttggccaggctggtctcaaactcctgacctcagaggatccacctgcctcagcctcccaaagtgctgggattacagatgtaggccactgcgcccggccaagtattgctcttatacattaaaaaacaggtgtgagccactgcgcccagccaggtattgctcttatacattaaaaaataggccggtgcagtggctcacgcctgtaatcccagcactttgggaagccaaggcgggcagaacacccgaggtcaggagtccaaggccagcctggccaagatggtgaaaccccgtctctattaaaaatacaaacattacctgggcatgatggtgggcgcctgtaatcccagctactcaggaggctgaggcaggaggatccgcggagcctggcagatctgcctgagcctgggaggttgaggctacagtaagccaagatcatgccagtatacttcagcctgggcgacaaagtgagaccgtaacaaaaaaaaaaaaatttaaaaaaagaaatttagatcaagatccaactgtaaaaagtggcctaaacaccacattaaagagtttggagtttattctgcaggcagaagagaaccatcagggggtcttcagcatgggaatggcatggtgcacctggtttttgtgagatcatggtggtgacagtgtggggaatgttattttggagggactggaggcagacagaccggttaaaaggccagcacaacagataaggaggaagaagatgagggcttggaccgaagcagagaagagcaaacagggaaggtacaaattcaagaaatattggggggtttgaatcaacacatttagatgattaattaaatatgaggactgaggaataagaaatgagtcaaggatggttccaggctgctaggctgcttacctgaggtggcaaagtcgggaggagtggcagtttaggacagggggcagttgaggaatattgttttgatcattttgagtttgaggtacaagttggacacttaggtaaagactggaggggaaatctgaatatacaattatgggactgaggaacaagtttattttattttttgtttcgttttcttgttgaagaacaaatttaattgtaatcccaagtcatcagcatctagaagacagtggcaggaggtgactgtcttgtgggtaagggtttggggtccttgatgagtatctctcaattggccttaaatataagcaggaaaaggagtttatgatggattccaggctcagcagggctcaggagggctcaggcagccagcagaggaagtcagagcatcttctttggtttagcccaagtaatgacttccttaaaaagctgaaggaaaatccagagtgaccagattataaactgtactcttgcattttctctccctcctctcacccacagcctcttgatgaaccggaggaagtttctttaccaattcaaaaatgtccgctgggctaagggtcggcgtgagacctacctgtgctacgtagtgaagaggcgtgacagtgctacatccttttcactggactttggttatcttcgcaataaggtatcaattaaagtcggctttgcaagcagtttaatggtcaactgtgagtgcttttagagccacctgctgatggtattacttccatccttttttggcatttgtgtctctatcacattcctcaaatccttttttttatttctttttccatgtccatgcacccatattagacatggcccaaaatatgtgatttaattcctccccagtaatgctgggcaccctaataccactccttccttcagtgccaagaacaactgctcccaaactgtttaccagctttcctcagcatctgaattgcctttgagattaattaagctaaaagcatttttatatgggagaatattatcagcttgtccaagcaaaaattttaaatgtgaaaaacaaattgtgtcttaagcatttttgaaaattaaggaagaagaatttgggaaaaaattaacggtggctcaattctgtcttccaaatgatttcttttccctcctactcacatgggtcgtaggccagtgaatacattcaacatggtgatccccagaaaactcagagaagcctcggctgatgattaattaaattgatctttcggctacccgagagaattacatttccaagagacttcttcaccaaaatccagatgggtttacataaacttctgcccacgggtatctcctctctcctaacacgctgtgacgtctgggcttggtggaatctcagggaagcatccgtggggtggaaggtcatcgtctggctcgttgtttgatggttatattaccatgcaattttctttgcctacatttgtattgaatacatcccaatctccttcctattcggtgacatgacacattctatttcagaaggctttgattttatcaagcactttcatttacttctcatggcagtgcctattacttctcttacaatacccatctgtctgctttaccaaaatctatttccccttttcagatcctcccaaatggtcctcataaactgtcctgcctccacctagtggtccaggtatatttccacaatgttacatcaacaggcacttctagccattttccttctcaaaaggtgcaaaaagcaacttcataaacacaaattaaatcttcggtgaggtagtgtgatgctgcttcctcccaactcagcgcacttcgtcttcctcattccacaaaaacccatagccttccttcactctgcaggactagtgctgccaagggttcagctctacctactggtgtgctcttttgagcaagttgcttagcctctctgtaacacaaggacaatagctgcaagcatccccaaagatcattgcaggagacaatgactaaggctaccagagccgcaataaaagtcagtgaattttagcgtggtcctctctgtctctccagaacggctgccacgtggaattgctcttcctccgctacatctcggactgggacctagaccctggccgctgctaccgcgtcacctggttcacctcctggagcccctgctacgactgtgcccgacatgtggccgactttctgcgagggaaccccaacctcagtctgaggatcttcaccgcgcgcctctacttctgtgaggaccgcaaggctgagcccgaggggctgcggcggctgcaccgcgccggggtgcaaatagccatcatgaccttcaaaggtgcgaaagggccttccgcgcaggcgcagtgcagcagcccgcattcgggattgcgatgcggaatgaatgagttagtggggaagctcgaggggaagaagtgggcggggattctggttcacctctggagccgaaattaaagattagaagcagagaaaagagtgaatggctcagagacaaggccccgaggaaatgagaaaatggggccagggttgcttctttcccctcgatttggaacctgaactgtcttctacccccatatccccgcctttttttcctttttttttttttgaagattatttttactgctggaatacttttgtagaaaaccacgaaagaactttcaaagcctgggaagggctgcatgaaaattcagttcgtctctccagacagcttcggcgcatccttttggtaaggggcttcctcgctttttaaattttctttctttctctacagtcttttttggagtttcgtatatttcttatattttcttattgttcaatcactctcagttttcatctgatgaaaactttatttctcctccacatcagctttttcttctgctgtttcaccattcagagccctctgctaaggttccttttccctcccttttctttcttttgttgtttcacatctttaaatttctgtctctccccagggttgcgtttccttcctggtcagaattcttttctcctttttttttttttttttttttttttttaaacaaacaaacaaaaaacccaaaaaaactctttcccaatttactttcttccaacatgttacaaagccatccactcagtttagaagactctccggccccaccgacccccaacctcgttttgaagccattcactcaatttgcttctctctttctctacagcccctgtatgaggttgatgacttacgagacgcatttcgtactttgggactttgatagcaacttccaggaatgtcacacacgatgaaatatctctgctgaagacagtggataaaaaacagtccttcaagtcttctctgtttttattcttcaactctcactttcttagagtttacagaaaaaatatttatatacgactctttaaaaagatctatgtcttgaaaatagagaaggaacacaggtctggccagggacgtgctgcaattggtgcagttttgaatgcaacattgtcccctactgggaataacagaactgcaggacctgggagcatcctaaagtgtcaacgtttttctatgacttttaggtaggatgagagcagaaggtagatcctaaaaagcatggtgagaggatcaaatgtttttatatcaacatcctttattatttgattcatttgagttaacagtggtgttagtgatagatttttctattcttttcccttgacgtttactttcaagtaacacaaactcttccatcaggccatgatctataggacctcctaatgagagtatctgggtgattgtgaccccaaaccatctctccaaagcattaatatccaatcatgcgctgtatgttttaatcagcagaagcatgtttttatgtttgtacaaaagaagattgttatgggtggggatggaggtatagaccatgcatggtcaccttcaagctactttaataaaggatcttaaaatgggcaggaggactgtgaacaagacaccctaataatgggttgatgtctgaagtagcaaatcttctggaaacgcaaactcttttaaggaagtccctaatttagaaacacccacaaacttcacatatcataattagcaaacaattggaaggaagttgcttgaatgttggggagaggaaaatctattggctctcgtgggtctcttcatctcagaaatgccaatcaggtcaaggtttgctacattttgtatgtgtgtgatgcttctcccaaaggtatattaactatataagagagttgtgacaaaacagaatgataaagctgcgaaccgtggcacacgctcatagttctagctgcttgggaggttgaggagggaggatggcttgaacacaggtgttcaaggccagcctgggcaacataacaagatcctgtctctcaaaaaaaaaaaaaaaaaaaagaaagagagagggccgggcgtggtggctcacgcctgtaatcccagcactttgggaggccgagccgggcggatcacctgtggtcaggagtttgagaccagcctggccaacatggcaaaaccccgtctgtactcaaaatgcaaaaattagccaggcgtggtagcaggcacctgtaatcccagctacttgggaggctgaggcaggagaatcgcttgaacccaggaggtggaggttgcagtaagctgagatcgtgccgttgcactccagcctgggcgacaagagcaagactctgtctcagaaaaaaaaaaaaaaaagagagagagagagaaagagaacaatatttgggagagaaggatggggaagcattgcaaggaaattgtgctttatccaacaaaatgtaaggagccaataagggatccctatttgtctcttttggtgtctatttgtccctaacaactgtctttgacagtgagaaaaatattcagaataaccatatccctgtgccgttattacctagcaacccttgcaatgaagatgagcagatccacaggaaaacttgaatgcacaactgtcttattttaatcttattgtacataagtttgtaaaagagttaaaaattgttacttcatgtattcatttatattttatattattttgcgtctaatgattttttattaacatgatttccttttctgatatattgaaatggagtctcaaagcttcataaatttataactttagaaatgattctaataacaacgtatgtaattgtaacattgcagtaatggtgctacgaagccatttctcttgatttttagtaaacttttatgacagcaaatttgcttctggctcactttcaatcagttaaataaatgataaataattttggaagctgtgaagataaaataccaaataaaataatataaaagtgatttatatgaagttaaaataaaaaatcagtatgatggaataaacttg

SEQ ID NO: 45-55 - skipped (11 entries)

SEQ ID NO: 56 - protein, 16 aa, synthetic construct
  REGION 1..16: note = Description of Artificial Sequence: Synthetic peptide
SGSETPGTSESATPES

SEQ ID NO: 57 - protein, 4 aa, synthetic construct
  REGION 1..4: note = Description of Artificial Sequence: Synthetic peptide
SGGS

SEQ ID NO: 58-64 - skipped (7 entries)

SEQ ID NO: 65 - protein, 5 aa, synthetic construct
  REGION 1..5: note = Description of Artificial Sequence: Synthetic peptide
PAPAP

SEQ ID NO: 66 - protein, 6 aa, synthetic construct
  REGION 1..6: note = Description of Artificial Sequence: Synthetic peptide
PAPAPA

SEQ ID NO: 67 - protein, 7 aa, synthetic construct
  REGION 1..7: note = Description of Artificial Sequence: Synthetic peptide
PAPAPAP

SEQ ID NO: 68 - protein, 8 aa, synthetic construct
  REGION 1..8: note = Description of Artificial Sequence: Synthetic peptide
PAPAPAPA

SEQ ID NO: 69 - protein, 9 aa, synthetic construct
  REGION 1..9: note = Description of Artificial Sequence: Synthetic peptide
PAPAPAPAP

SEQ ID NO: 70 - protein, 15 aa, synthetic construct
  REGION 1..15: note = Description of Artificial Sequence: Synthetic peptide
PAPAPAPAPAPAPAP

SEQ ID NO: 71 - protein, 21 aa, synthetic construct
  REGION 1..21: note = Description of Artificial Sequence: Synthetic peptide
PAPAPAPAPAPAPAPAPAPAP

SEQ ID NO: 72-82 - skipped (11 entries)

SEQ ID NO: 83 - protein, 29 aa, synthetic construct
  REGION 1..29: note = Description of Artificial Sequence: Synthetic peptide
PKKKRKVEGADKRTADGSEFESPKKKRKV

SEQ ID NO: 84 - protein, 18 aa, synthetic construct
  REGION 1..18: note = Description of Artificial Sequence: Synthetic peptide
KRTADGSEFESPKKKRKV

SEQ ID NO: 85 - protein, 16 aa, synthetic construct
  REGION 1..16: note = Description of Artificial Sequence: Synthetic peptide
KRPAATKKAGQAKKKK

SEQ ID NO: 86 - protein, 17 aa, synthetic construct
  REGION 1..17: note = Description of Artificial Sequence: Synthetic peptide
KKTELQTTNAENKTKKL

SEQ ID NO: 87 - protein, 19 aa, synthetic construct
  REGION 1..19: note = Description of Artificial Sequence: Synthetic peptide
KRGINDRNFWRGENGRKTR

SEQ ID NO: 88 - protein, 16 aa, synthetic construct
  REGION 1..16: note = Description of Artificial Sequence: Synthetic peptide
RKSGKIAAIVVKRPRK

SEQ ID NO: 89 - protein, 7 aa, synthetic construct
  REGION 1..7: note = Description of Artificial Sequence: Synthetic peptide
PKKKRKV

SEQ ID NO: 90 - protein, 30 aa, synthetic construct
  REGION 1..30: note = Description of Artificial Sequence: Synthetic peptide
MDSLLMNRRKFLYQFKNVRWAKGRRETYLC

SEQ ID NO: 91-105 - skipped (15 entries)

SEQ ID NO: 106 - protein, 84 aa, unidentified
  REGION 1..84: note = Description of Unknown: Bacillus phage PBS2 sequence
MTNLSDIIEKETGKQLVIQESILMLPEEVEEVIGNKPESDILVHTAYDESTDENVMLLTSDAPEYKPWALVIQDSNGENKIKML

SEQ ID NO: 107-108 - skipped (2 entries)

SEQ ID NO: 109 - protein, 5 aa, synthetic construct
  REGION 1..5: note = Description of Artificial Sequence: Synthetic peptide
GGGGS

SEQ ID NO: 110-222 - skipped (113 entries)

SEQ ID NO: 223 - protein, 1368 aa, unidentified [sequence omitted]

SEQ ID NO: 224 - RNA, 80 nt, synthetic construct
  misc_feature 1..80: note = Description of Artificial Sequence: Synthetic oligonucleotide
  source 1..80: mol_type = other RNA
gttttagagctagaaatagcaagttaaaataaggctagtccgttatcaacttgaaaaagtggcaccgagtcggtgctttt

SEQ ID NO: 225 - RNA, 125 nt, synthetic construct
  misc_feature 1..125: note = Description of Artificial Sequence: Synthetic polynucleotide
  source 1..125: mol_type = other RNA
gtttttgtactctcaagatttaagtaactgtacaacgaaacttacacagttacttaaatcttgcagaagctacaaagataaggcttcatgccgaaatcaacaccctgtcattttatggcagggtg

SEQ ID NO: 226 - RNA, 76 nt, synthetic construct
  misc_feature 1..76: note = Description of Artificial Sequence: Synthetic oligonucleotide
  source 1..76: mol_type = other RNA
gttttagagctagaaatagcaagttaaaataaggctagtccgttatcaacttgaaaaagtggcaccgagtcggtgc

SEQ ID NO: 227 - RNA, 84 nt, synthetic construct
  misc_feature 1..84: note = Description of Artificial Sequence: Synthetic oligonucleotide
  source 1..84: mol_type = other RNA
gttttagtactctgtaatgaaaattacagaatctactaaaacaaggcaaaatgccgtgtttatctcgtcaacttgttggcgaga

SEQ ID NO: 228 - RNA, 97 nt, synthetic construct
  misc_feature 1..97: note = Description of Artificial Sequence: Synthetic oligonucleotide
  source 1..97: mol_type = other RNA
gttctgtcttttggtcaggacaaccgtctagctataagtgctgcagggtgtgagaaactcctattgctggacgatgtctcttacgaggcattagcac

SEQ ID NO: 229 - RNA, 88 nt, synthetic construct
  misc_feature 1..88: note = Description of Artificial Sequence: Synthetic oligonucleotide
  source 1..88: mol_type = other RNA
gacctatagggtcaatgaatctgtgcgtgtgccataagtaattaaaaattacccaccacaggagcacctgaaaacaggtgcttggcac

SEQ ID NO: 230 - RNA, 80 nt, synthetic construct
  misc_feature 1..80: note = Description of Artificial Sequence: Synthetic oligonucleotide
  source 1..80: mol_type = other RNA
gttttagagctagaaatagcaagttaaaataaggctagtccgttatcaacttgaaaaagtgggaccgagtcggtgctttt

SEQ ID NO: 231 - DNA, 4104 bp, Streptococcus pyogenes
  source 1..4104: mol_type = other DNA
atggataagaaatactcaataggcttagatatcggcacaaatagcgtcggatgggcggtgatcactgatgattataaggttccgtctaaaaagttcaaggttctgggaaatacagaccgccacagtatcaaaaaaaatcttataggggctcttttatttggcagtggagagacagcggaagcgactcgtctcaaacggacagctcgtagaaggtatacacgtcggaagaatcgtatttgttatctacaggagattttttcaaatgagatggcgaaagtagatgatagtttctttcatcgacttgaagagtcttttttggtggaagaagacaagaagcatgaacgtcatcctatttttggaaatatagtagatgaagttgcttatcatgagaaatatccaactatctatcatctgcgaaaaaaattggcagattctactgataaagcggatttgcgcttaatctatttggccttagcgcatatgattaagtttcgtggtcattttttgattgagggagatttaaatcctgataatagtgatgtggacaaactatttatccagttggtacaaatctacaatcaattatttgaagaaaaccctattaacgcaagtagagtagatgctaaagcgattctttctgcacgattgagtaaatcaagacgattagaaaatctcattgctcagctccccggtgagaagagaaatggcttgtttgggaatctcattgctttgtcattgggattgacccctaattttaaatcaaattttgatttggcagaagatgctaaattacagctttcaaaagatacttacgatgatgatttagataatttattggcgcaaattggagatcaatatgctgatttgtttttggcagctaagaatttatcagatgctattttactttcagatatcctaagagtaaatagtgaaataactaaggctcccctatcagcttcaatgattaagcgctacgatgaacatcatcaagacttgactcttttaaaagctttagttcgacaacaacttccagaaaagtataaagaaatcttttttgatcaatcaaaaaacggatatgcaggttatattgatgggggagctagccaagaagaattttataaatttatcaaaccaattttagaaaaaatggatggtactgaggaattattggtgaaactaaatcgtgaagatttgctgcgcaagcaacggacctttgacaacggctctattccccatcaaattcacttgggtgagctgcatgctattttgagaagacaagaagacttttatccatttttaaaagacaatcgtgagaagattgaaaaaatcttgacttttcgaattccttattatgttggtccattggcgcgtggcaatagtcgttttgcatggatgactcggaagtctgaagaaacaattaccccatggaattttgaagaagttgtcgataaaggtgcttcagctcaatcatttattgaacgcatgacaaactttgataaaaatcttccaaatgaaaaagtactaccaaaacatagtttgctttatgagtattttacggtttataacgaattgacaaaggtcaaatatgttactgagggaatgcgaaaaccagcatttctttcaggtgaacagaagaaagccattgttgatttactcttcaaaacaaatcgaaaagtaaccgttaagcaattaaaagaagattatttcaaaaaaatagaatgttttgatagtgttgaaatttcaggagttgaagatagatttaatgcttcattaggcgcctaccatgatttgctaaaaattattaaagataaagattttttggataatgaagaaaatgaagatatcttagaggatattgttttaacattgaccttatttgaagatagggggatgattgaggaaagacttaaaacatatgctcacctctttgatgataaggtgatgaaacagcttaaacgtcgccgttatactggttggggacgtttgtctcgaaaattgattaatggtattagggataagcaatctggcaaaacaatattagattttttgaaatcagatggttttgccaatcgcaattttatgcagctgatccatgatgatagtttgacatttaaagaagatattcaaaaagcacaggtgtctggacaaggccatagtttacatgaacagattgctaacttagctggcagtcctgctattaaaaaaggtattttacagactgtaaaaattgttgatgaactggtcaaagtaatggggcataagccagaaaatatcgttattgaaatggcacgtgaaaatcagacaactcaaaagggccagaaaaattcgcgagagcgtatgaaacgaatcgaagaaggtatcaaagaattaggaagtcagattcttaaagagcatcctgttgaaaatactcaattgcaaaatgaaaagctctatctctattatctacaaaatggaagagacatgtatgtggaccaagaattagatattaatcgtttaagtgattatgatgtcgatcacattgttccacaaagtttcattaaagacgattcaatagacaataaggtactaacgcgttctgataaaaatcgtggtaaatcggataacgttccaagtgaagaagtagtcaaaaagatgaaaaactattggagacaacttctaaacgccaagttaatcactcaacgtaagtttgataatttaacgaaagctgaacgtggaggtttgagtgaacttgataaagctggttttatcaaacgccaattggttgaaactcgccaaatcactaagcatgtggcacaaattttggatagtcgcatgaatactaaatacgatgaaaatgataaacttattcgagaggttaaagtgattaccttaaaatctaaattagtttctgacttccgaaaagatttccaattctataaagtacgtgagattaacaattaccatcatgcccatgatgcgtatctaaatgccgtcgttggaactgctttgattaagaaatatccaaaacttgaatcggagtttgtctatggtgattataaagtttatgatgttcgtaaaatgattgctaagtctgagcaagaaataggcaaagcaaccgcaaaatatttcttttactctaatatcatgaacttcttcaaaacagaaattacacttgcaaatggagagattcgcaaacgccctctaatcgaaactaatggggaaactggagaaattgtctgggataaagggcgagattttgccacagtgcgcaaagtattgtccatgccccaagtcaatattgtcaagaaaacagaagtacagacaggcggattctccaaggagtcaattttaccaaaaagaaattcggacaagcttattgctcgtaaaaaagactgggatccaaaaaaatatggtggttttgatagtccaacggtagcttattcagtcctagtggttgctaaggtggaaaaagggaaatcgaagaagttaaaatccgttaaagagttactagggatcacaattatggaaagaagttcctttgaaaaaaatccgattgactttttagaagctaaaggatataaggaagttaaaaaagacttaatcattaaactacctaaatatagtctttttgagttagaaaacggtcgtaaacggatgctggctagtgccggagaattacaaaaaggaaatgagctggctctgccaagcaaatatgtgaattttttatatttagctagtcattatgaaaagttgaagggtagtccagaagataacgaacaaaaacaattgtttgtggagcagcataagcattatttagatgagattattgagcaaatcagtgaattttctaagcgtgttattttagcagatgccaatttagataaagttcttagtgcatataacaaacatagagacaaaccaatacgtgaacaagcagaaaatattattcatttatttacgttgacgaatcttggagctcccgctgcttttaaatattttgatacaacaattgatcgtaaacgatatacgtctacaaaagaagttttagatgccactcttatccatcaatccatcactggtctttatgaaacacgcattgatttgagtcagctaggaggtgactga

SEQ ID NO: 232 - protein, 1367 aa, Streptococcus pyogenes
MDKKYSIGLDIGTNSVGWAVITDDYKVPSKKFKVLGNTDRHSIKKNLIGALLFGSGETAEATRLKRTARRRYTRRKNRICYLQEIFSNEMAKVDDSFFHRLEESFLVEEDKKHERHPIFGNIVDEVAYHEKYPTIYHLRKKLADSTDKADLRLIYLALAHMIKFRGHFLIEGDLNPDNSDVDKLFIQLVQIYNQLFEENPINASRVDAKAILSARLSKSRRLENLIAQLPGEKRNGLFGNLIALSLGLTPNFKSNFDLAEDAKLQLSKDTYDDDLDNLLAQIGDQYADLFLAAKNLSDAILLSDILRVNSEITKAPLSASMIKRYDEHHQDLTLLKALVRQQLPEKYKEIFFDQSKNGYAGYIDGGASQEEFYKFIKPILEKMDGTEELLVKLNREDLLRKQRTFDNGSIPHQIHLGELHAILRRQEDFYPFLKDNREKIEKILTFRIPYYVGPLARGNSRFAWMTRKSEETITPWNFEEVVDKGASAQSFIERMTNFDKNLPNEKVLPKHSLLYEYFTVYNELTKVKYVTEGMRKPAFLSGEQKKAIVDLLFKTNRKVTVKQLKEDYFKKIECFDSVEISGVEDRFNASLGAYHDLLKIIKDKDFLDNEENEDILEDIVLTLTLFEDRGMIEERLKTYAHLFDDKVMKQLKRRRYTGWGRLSRKLINGIRDKQSGKTILDFLKSDGFANRNFMQLIHDDSLTFKEDIQKAQVSGQGHSLHEQIANLAGSPAIKKGILQTVKIVDELVKVMGHKPENIVIEMARENQTTQKGQKNSRERMKRIEEGIKELGSQILKEHPVENTQLQNEKLYLYYLQNGRDMYVDQELDINRLSDYDVDHIVPQSFIKDDSIDNKVLTRSDKNRGKSDNVPSEEVVKKMKNYWRQLLNAKLITQRKFDNLTKAERGGLSELDKAGFIKRQLVETRQITKHVAQILDSRMNTKYDENDKLIREVKVITLKSKLVSDFRKDFQFYKVREINNYHHAHDAYLNAVVGTALIKKYPKLESEFVYGDYKVYDVRKMIAKSEQEIGKATAKYFFYSNIMNFFKTEITLANGEIRKRPLIETNGETGEIVWDKGRDFATVRKVLSMPQVNIVKKTEVQTGGFSKESILPKRNSDKLIARKKDWDPKKYGGFDSPTVAYSVLVVAKVEKGKSKKLKSVKELLGITIMERSSFEKNPIDFLEAKGYKEVKKDLIIKLPKYSLFELENGRKRMLASAGELQKGNELALPSKYVNFLYLASHYEKLKGSPEDNEQKQLFVEQHKHYLDEIIEQISEFSKRVILADANLDKVLSAYNKHRDKPIREQAENIIHLFTLTNLGAPAAFKYFDTTIDRKRYTSTKEVLDATLIHQSITGLYETRIDLSQLGGD

SEQ ID NO: 233 - DNA, 4212 bp, unidentified
  misc_feature 1..4212: note = Description of Unknown: Cas9 domain sequence
  source 1..4212: mol_type = other DNA
atggataaaaagtattctattggtttagacatcggcactaattccgttggatgggctgtcataaccgatgaatacaaagtaccttcaaagaaatttaaggtgttggggaacacagaccgtcattcgattaaaaagaatcttatcggtgccctcctattcgatagtggcgaaacggcagaggcgactcgcctgaaacgaaccgctcggagaaggtatacacgtcgcaagaaccgaatatgttacttacaagaaatttttagcaatgagatggccaaagttgacgattctttctttcaccgtttggaagagtccttccttgtcgaagaggacaagaaacatgaacggcaccccatctttggaaacatagtagatgaggtggcatatcatgaaaagtacccaacgatttatcacctcagaaaaaagctagttgactcaactgataaagcggacctgaggttaatctacttggctcttgcccatatgataaagttccgtgggcactttctcattgagggtgatctaaatccggacaactcggatgtcgacaaactgttcatccagttagtacaaacctataatcagttgtttgaagagaaccctataaatgcaagtggcgtggatgcgaaggctattcttagcgcccgcctctctaaatcccgacggctagaaaacctgatcgcacaattacccggagagaagaaaaatgggttgttcggtaaccttatagcgctctcactaggcctgacaccaaattttaagtcgaacttcgacttagctgaagatgccaaattgcagcttagtaaggacacgtacgatgacgatctcgacaatctactggcacaaattggagatcagtatgcggacttatttttggctgccaaaaaccttagcgatgcaatcctcctatctgacatactgagagttaatactgagattaccaaggcgccgttatccgcttcaatgatcaaaaggtacgatgaacatcaccaagacttgacacttctcaaggccctagtccgtcagcaactgcctgagaaatataaggaaatattctttgatcagtcgaaaaacgggtacgcaggttatattgacggcggagcgagtcaagaggaattctacaagtttatcaaacccatattagagaagatggatgggacggaagagttgcttgtaaaactcaatcgcgaagatctactgcgaaagcagcggactttcgacaacggtagcattccacatcaaatccacttaggcgaattgcatgctatacttagaaggcaggaggatttttatccgttcctcaaagacaatcgtgaaaagattgagaaaatcctaacctttcgcataccttactatgtgggacccctggcccgagggaactctcggttcgcatggatgacaagaaagtccgaagaaacgattactccatggaattttgaggaagttgtcgataaaggtgcgtcagctcaatcgttcatcgagaggatgaccaactttgacaagaatttaccgaacgaaaaagtattgcctaagcacagtttactttacgagtatttcacagtgtacaatgaactcacgaaagttaagtatgtcactgagggcatgcgtaaacccgcctttctaagcggagaacagaagaaagcaatagtagatctgttattcaagaccaaccgcaaagtgacagttaagcaattgaaagaggactactttaagaaaattgaatgcttcgattctgtcgagatctccggggtagaagatcgatttaatgcgtcacttggtacgtatcatgacctcctaaagataattaaagataaggacttcctggataacgaagagaatgaagatatcttagaagatatagtgttgactcttaccctctttgaagatcgggaaatgattgaggaaagactaaaaacatacgctcacctgttcgacgataaggttatgaaacagttaaagaggcgtcgctatacgggctggggacgattgtcgcggaaacttatcaacgggataagagacaagcaaagtggtaaaactattctcgattttctaaagagcgacggcttcgccaataggaactttatgcagctgatccatgatgactctttaaccttcaaagaggatatacaaaaggcacaggtttccggacaaggggactcattgcacgaacatattgcgaatcttgctggttcgccagccatcaaaaagggcatactccagacagtcaaagtagtggatgagctagttaaggtcatgggacgtcacaaaccggaaaacattgtaatcgagatggcacgcgaaaatcaaacgactcagaaggggcaaaaaaacagtcgagagcggatgaagagaatagaagagggtattaaagaactgggcagccagatcttaaaggagcatcctgtggaaaatacccaattgcagaacgagaaactttacctctattacctacaaaatggaagggacatgtatgttgatcaggaactggacataaaccgtttatctgattacgacgtcgatcacattgtaccccaatcctttttgaaggacgattcaatcgacaataaagtgcttacacgctcggataagaaccgagggaaaagtgacaatgttccaagcgaggaagtcgtaaagaaaatgaagaactattggcggcagctcctaaatgcgaaactgataacgcaaagaaagttcgataacttaactaaagctgagaggggtggcttgtctgaacttgacaaggccggatttattaaacgtcagctcgtggaaacccgccaaatcacaaagcatgttgcacagatactagattcccgaatgaatacgaaatacgacgagaacgataagctgattcgggaagtcaaagtaatcactttaaagtcaaaattggtgtcggacttcagaaaggattttcaattctataaagttagggagataaataactaccaccatgcgcacgacgcttatcttaatgccgtcgtagggaccgcactcattaagaaatacccgaagctagaaagtgagtttgtgtatggtgattacaaagtttatgacgtccgtaagatgatcgcgaaaagcgaacaggagataggcaaggctacagccaaatacttcttttattctaacattatgaatttctttaagacggaaatcactctggcaaacggagagatacgcaaacgacctttaattgaaaccaatggggagacaggtgaaatcgtatgggataagggccgggacttcgcgacggtgagaaaagttttgtccatgccccaagtcaacatagtaaagaaaactgaggtgcagaccggagggttttcaaaggaatcgattcttccaaaaaggaatagtgataagctcatcgctcgtaaaaaggactgggacccgaaaaagtacggtggcttcgatagccctacagttgcctattctgtcctagtagtggcaaaagttgagaagggaaaatccaagaaactgaagtcagtcaaagaattattggggataacgattatggagcgctcgtcttttgaaaagaaccccatcgacttccttgaggcgaaaggttacaaggaagtaaaaaaggatctcataattaaactaccaaagtatagtctgtttgagttagaaaatggccgaaaacggatgttggctagcgccggagagcttcaaaaggggaacgaactcgcactaccgtctaaatacgtgaatttcctgtatttagcgtcccattacgagaagttgaaaggttcacctgaagataacgaacagaagcaactttttgttgagcagcacaaacattatctcgacgaaatcatagagcaaatttcggaattcagtaagagagtcatcctagctgatgccaatctggacaaagtattaagcgcatacaacaagcacagggataaacccatacgtgagcaggcggaaaatattatccatttgtttactcttaccaacctcggcgctccagccgcattcaagtattttgacacaacgatagatcgcaaacgatacacttctaccaaggaggtgctagacgcgacactgattcaccaatccatcacgggattatatgaaactcggatagatttgtcacagcttgggggtgacggatcccccaagaagaagaggaaagtctcgagcgactacaaagaccatgacggtgattataaagatcatgacatcgattacaaggatgacgatgacaaggctgcagga

SEQ ID NO: 234 - protein, 1368 aa, synthetic construct
  REGION 1..1368: note = Description of Artificial Sequence: Synthetic polypeptide
MDKKYSIGLAIGTNSVGWAVITDEYKVPSKKFKVLGNTDRHSIKKNLIGALLFDSGETAEATRLKRTARRRYTRRKNRICYLQEIFSNEMAKVDDSFFHRLEESFLVEEDKKHERHPIFGNIVDEVAYHEKYPTIYHLRKKLVDSTDKADLRLIYLALAHMIKFRGHFLIEGDLNPDNSDVDKLFIQLVQTYNQLFEENPINASGVDAKAILSARLSKSRRLENLIAQLPGEKKNGLFGNLIALSLGLTPNFKSNFDLAEDAKLQLSKDTYDDDLDNLLAQIGDQYADLFLAAKNLSDAILLSDILRVNTEITKAPLSASMIKRYDEHHQDLTLLKALVRQQLPEKYKEIFFDQSKNGYAGYIDGGASQEEFYKFIKPILEKMDGTEELLVKLNREDLLRKQRTFDNGSIPHQIHLGELHAILRRQEDFYPFLKDNREKIEKILTFRIPYYVGPLARGNSRFAWMTRKSEETITPWNFEEVVDKGASAQSFIERMTNFDKNLPNEKVLPKHSLLYEYFTVYNELTKVKYVTEGMRKPAFLSGEQKKAIVDLLFKTNRKVTVKQLKEDYFKKIECFDSVEISGVEDRFNASLGTYHDLLKIIKDKDFLDNEENEDILEDIVLTLTLFEDREMIEERLKTYAHLFDDKVMKQLKRRRYTGWGRLSRKLINGIRDKQSGKTILDFLKSDGFANRNFMQLIHDDSLTFKEDIQKAQVSGQGDSLHEHIANLAGSPAIKKGILQTVKVVDELVKVMGRHKPENIVIEMARENQTTQKGQKNSRERMKRIEEGIKELGSQILKEHPVENTQLQNEKLYLYYLQNGRDMYVDQELDINRLSDYDVDHIVPQSFLKDDSIDNKVLTRSDKNRGKSDNVPSEEVVKKMKNYWRQLLNAKLITQRKFDNLTKAERGGLSELDKAGFIKRQLVETRQITKHVAQILDSRMNTKYDENDKLIREVKVITLKSKLVSDFRKDFQFYKVREINNYHHAHDAYLNAVVGTALIKKYPKLESEFVYGDYKVYDVRKMIAKSEQEIGKATAKYFFYSNIMNFFKTEITLANGEIRKRPLIETNGETGEIVWDKGRDFATVRKVLSMPQVNIVKKTEVQTGGFSKESILPKRNSDKLIARKKDWDPKKYGGFDSPTVAYSVLVVAKVEKGKSKKLKSVKELLGITIMERSSFEKNPIDFLEAKGYKEVKKDLIIKLPKYSLFELENGRKRMLASAGELQKGNELALPSKYVNFLYLASHYEKLKGSPEDNEQKQLFVEQHKHYLDEIIEQISEFSKRVILADANLDKVLSAYNKHRDKPIREQAENIIHLFTLTNLGAPAAFKYFDTTIDRKRYTSTKEVLDATLIHQSITGLYETRIDLSQLGGD

SEQ ID NO: 235 - DNA, 4212 bp, unidentified; identical to SEQ ID NO: 233
  misc_feature 1..4212: note = Description of Unknown: Cas9 polynucleotide sequence
  source 1..4212: mol_type = other DNA

SEQ ID NO: 236 - protein, 1368 aa, unidentified; identical to SEQ ID NO: 234
  REGION 1..1368: note = Description of Unknown: Cas9 polynucleotide sequence

SEQ ID NO: 237 - DNA, 4107 bp, Streptococcus pyogenes
  source 1..4107: mol_type = other DNA
atggataagaaatactcaataggcttagatatcggcacaaatagcgtcggatgggcggtgatcactgatgaatataaggttccgtctaaaaagttcaaggttctgggaaatacagaccgccacagtatcaaaaaaaatcttataggggctcttttatttgacagtggagagacagcggaagcgactcgtctcaaacggacagctcgtagaaggtatacacgtcggaagaatcgtatttgttatctacaggagattttttcaaatgagatggcgaaagtagatgatagtttctttcatcgacttgaagagtcttttttggtggaagaagacaagaagcatgaacgtcatcctatttttggaaatatagtagatgaagttgcttatcatgagaaatatccaactatctatcatctgcgaaaaaaattggtagattctactgataaagcggatttgcgcttaatctatttggccttagcgcatatgattaagtttcgtggtcattttttgattgagggagatttaaatcctgataatagtgatgtggacaaactatttatccagttggtacaaacctacaatcaattatttgaagaaaaccctattaacgcaagtggagtagatgctaaagcgattctttctgcacgattgagtaaatcaagacgattagaaaatctcattgctcagctccccggtgagaagaaaaatggcttatttgggaatctcattgctttgtcattgggtttgacccctaattttaaatcaaattttgatttggcagaagatgctaaattacagctttcaaaagatacttacgatgatgatttagataatttattggcgcaaattggagatcaatatgctgatttgtttttggcagctaagaatttatcagatgctattttactttcagatatcctaagagtaaatactgaaataactaaggctcccctatcagcttcaatgattaaacgctacgatgaacatcatcaagacttgactcttttaaaagctttagttcgacaacaacttccagaaaagtataaagaaatcttttttgatcaatcaaaaaacggatatgcaggttatattgatgggggagctagccaagaagaattttataaatttatcaaaccaattttagaaaaaatggatggtactgaggaattattggtgaaactaaatcgtgaagatttgctgcgcaagcaacggacctttgacaacggctctattccccatcaaattcacttgggtgagctgcatgctattttgagaagacaagaagacttttatccatttttaaaagacaatcgtgagaagattgaaaaaatcttgacttttcgaattccttattatgttggtccattggcgcgtggcaatagtcgttttgcatggatgactcggaagtctgaagaaacaattaccccatggaattttgaagaagttgtcgataaaggtgcttcagctcaatcatttattgaacgcatgacaaactttgataaaaatcttccaaatgaaaaagtactaccaaaacatagtttgctttatgagtattttacggtttataacgaattgacaaaggtcaaatatgttactgaaggaatgcgaaaaccagcatttctttcaggtgaacagaagaaagccattgttgatttactcttcaaaacaaatcgaaaagtaaccgttaagcaattaaaagaagattatttcaaaaaaatagaatgttttgatagtgttgaaatttcaggagttgaagatagatttaatgcttcattaggtacctaccatgatttgctaaaaattattaaagataaagattttttggataatgaagaaaatgaagatatcttagaggatattgttttaacattgaccttatttgaagatagggagatgattgaggaaagacttaaaacatatgctcacctctttgatgataaggtgatgaaacagcttaaacgtcgccgttatactggttggggacgtttgtctcgaaaattgattaatggtattagggataagcaatctggcaaaacaatattagattttttgaaatcagatggttttgccaatcgcaattttatgcagctgatccatgatgatagtttgacatttaaagaagacattcaaaaagcacaagtgtctggacaaggcgatagtttacatgaacatattgcaaatttagctggtagccctgctattaaaaaaggtattttacagactgtaaaagttgttgatgaattggtcaaagtaatggggcggcataagccagaaaatatcgttattgaaatggcacgtgaaaatcagacaactcaaaagggccagaaaaattcgcgagagcgtatgaaacgaatcgaagaaggtatcaaagaattaggaagtcagattcttaaagagcatcctgttgaaaatactcaattgcaaaatgaaaagctctatctctattatctccaaaatggaagagacatgtatgtggaccaagaattagatattaatcgtttaagtgattatgatgtcgatcacattgttccacaaagtttccttaaagacgattcaatagacaataaggtcttaacgcgttctgataaaaatcgtggtaaatcggataacgttccaagtgaagaagtagtcaaaaagatgaaaaactattggagacaacttctaaacgccaagttaatcactcaacgtaagtttgataatttaacgaaagctgaacgtggaggtttgagtgaacttgataaagctggttttatcaaacgccaattggttgaaactcgccaaatcactaagcatgtggcacaaattttggatagtcgcatgaatactaaatacgatgaaaatgataaacttattcgagaggttaaagtgattaccttaaaatctaaattagtttctgacttccgaaaagatttccaattctataaagtacgtgagattaacaattaccatcatgcccatgatgcgtatctaaatgccgtcgttggaactgctttgattaagaaatatccaaaacttgaatcggagtttgtctatggtgattataaagtttatgatgttcgtaaaatgattgctaagtctgagcaagaaataggcaaagcaaccgcaaaatatttcttttactctaatatcatgaacttcttcaaaacagaaattacacttgcaaatggagagattcgcaaacgccctctaatcgaaactaatggggaaactggagaaattgtctgggataaagggcgagattttgccacagtgcgcaaagtattgtccatgccccaagtcaatattgtcaagaaaacagaagtacagacaggcggattctccaaggagtcaattttaccaaaaagaaattcggacaagcttattgctcgtaaaaaagactgggatccaaaaaaatatggtggttttgatagtccaacggtagcttattcagtcctagtggttgctaaggtggaaaaagggaaatcgaagaagttaaaatccgttaaagagttactagggatcacaattatggaaagaagttcctttgaaaaaaatccgattgactttttagaagctaaaggatataaggaagttaaaaaagacttaatcattaaactacctaaatatagtctttttgagttagaaaacggtcgtaaacggatgctggctagtgccggagaattacaaaaaggaaatgagctggctctgccaagcaaatatgtgaattttttatatttagctagtcattatgaaaagttgaagggtagtccagaagataacgaacaaaaacaattgtttgtggagcagcataagcattatttagatgagattattgagcaaatcagtgaattttctaagcgtgttattttagcagatgccaatttagataaagttcttagtgcatataacaaacatagagacaaaccaatacgtgaacaagcagaaaatattattcatttatttacgttgacgaatcttggagctcccgctgcttttaaatattttgatacaacaattgatcgtaaacgatatacgtctacaaaagaagttttagatgccactcttatccatcaatccatcactggtctttatgaaacacgcattgatttgagtcagctaggaggtgactga

SEQ ID NO: 238 - protein, 1368 aa, synthetic construct
  REGION 1..1368: note = Description of Artificial Sequence: Synthetic polypeptide
MDKKYSIGLAIGTNSVGWAVITDEYKVPSKKFKVLGNTDRHSIKKNLIGALLFDSGETAEATRLKRTARRRYTRRKNRICYLQEIFSNEMAKVDDSFFHRLEESFLVEEDKKHERHPIFGNIVDEVAYHEKYPTIYHLRKKLVDSTDKADLRLIYLALAHMIKFRGHFLIEGDLNPDNSDVDKLFIQLVQTYNQLFEENPINASGVDAKAILSARLSKSRRLENLIAQLPGEKKNGLFGNLIALSLGLTPNFKSNFDLAEDAKLQLSKDTYDDDLDNLLAQIGDQYADLFLAAKNLSDAILLSDILRVNTEITKAPLSASMIKRYDEHHQDLTLLKALVRQQLPEKYKEIFFDQSKNGYAGYIDGGASQEEFYKFIKPILEKMDGTEELLVKLNREDLLRKQRTFDNGSIPHQIHLGELHAILRRQEDFYPFLKDNREKIEKILTFRIPYYVGPLARGNSRFAWMTRKSEETITPWNFEEVVDKGASAQSFIERMTNFDKNLPNEKVLPKHSLLYEYFTVYNELTKVKYVTEGMRKPAFLSGEQKKAIVDLLFKTNRKVTVKQLKEDYFKKIECFDSVEISGVEDRFNASLGTYHDLLKIIKDKDFLDNEENEDILEDIVLTLTLFEDREMIEERLKTYAHLFDDKVMKQLKRRRYTGWGRLSRKLINGIRDKQSGKTILDFLKSDGFANRNFMQLIHDDSLTFKEDIQKAQVSGQGDSLHEHIANLAGSPAIKKGILQTVKVVDELVKVMGRHKPENIVIEMARENQTTQKGQKNSRERMKRIEEGIKELGSQILKEHPVENTQLQNEKLYLYYLQNGRDMYVDQELDINRLSDYDVDAIVPQSFLKDDSIDNKVLTRSDKNRGKSDNVPSEEVVKKMKNYWRQLLNAKLITQRKFDNLTKAERGGLSELDKAGFIKRQLVETRQITKHVAQILDSRMNTKYDENDKLIREVKVITLKSKLVSDFRKDFQFYKVREINNYHHAHDAYLNAVVGTALIKKYPKLESEFVYGDYKVYDVRKMIAKSEQEIGKATAKYFFYSNIMNFFKTEITLANGEIRKRPLIETNGETGEIVWDKGRDFATVRKVLSMPQVNIVKKTEVQTGGFSKESILPKRNSDKLIARKKDWDPKKYGGFDSPTVAYSVLVVAKVEKGKSKKLKSVKELLGITIMERSSFEKNPIDFLEAKGYKEVKKDLIIKLPKYSLFELENGRKRMLASAGELQKGNELALPSKYVNFLYLASHYEKLKGSPEDNEQKQLFVEQHKHYLDEIIEQISEFSKRVILADANLDKVLSAYNKHRDKPIREQAENIIHLFTLTNLGAPAAFKYFDTTIDRKRYTSTKEVLDATLIHQSITGLYETRIDLSQLGGD

SEQ ID NO: 239 - protein, 345 aa, Sulfolobus islandicus
MEVPLYNIFGDNYIIQVATEAENSTIYNNKVEIDDEELRNVLNLAYKIAKNNEDAAAERRGKAKKKKGEEGETTTSNIILPLSGNDKNPWTETLKCYNFPTTVALSEVFKNFSQVKECEEVSAPSFVKPEFYEFGRSPGMVERTRRVKLEVEPHYLIIAAAGWVLTRLGKAKVSEGDYVGVNVFTPTRGILYSLIQNVNGIVPGIKPETAFGLWIARKVVSSVTNPNVSVVRIYTISDAVGQNPTTINGGFSIDLTKLLEKRYLLSERLEAIARNALSISSNMRERYIVLANYIYEYLTGSKRLEDLLYFANRDLIMNLNSDDGKVRDLKLISAYVNGELIRGEG

SEQ ID NO: 240 - protein, 345 aa, Sulfolobus islandicus
MEVPLYNIFGDNYIIQVATEAENSTIYNNKVEIDDEELRNVLNLAYKIAKNNEDAAAERRGKAKKKKGEEGETTTSNIILPLSGNDKNPWTETLKCYNFPTTVALSEVFKNFSQVKECEEVSAPSFVKPEFYKFGRSPGMVERTRRVKLEVEPHYLIMAAAGWVLTRLGKAKVSEGDYVGVNVFTPTRGILYSLIQNVNGIVPGIKPETAFGLWIARKVVSSVTNPNVSVVSIYTISDAVGQNPTTINGGFSIDLTKLLEKRDLLSERLEAIARNALSISSNMRERYIVLANYIYEYLTGSKRLEDLLYFANRDLIMNLNSDDGKVRDLKLISAYVNGELIRGEG

SEQ ID NO: 241 - protein, 987 aa, synthetic construct
  REGION 1..987: note = Description of Artificial Sequence: Synthetic polypeptide
MEKRINKIRKKLSADNATKPVSRSGPMKTLLVRVMTDDLKKRLEKRRKKPEVMPQVISNNAANNLRMLLDDYTKMKEAILQVYWQEFKDDHVGLMCKFAQPASKKIDQNKLKPEMDEKGNLTTAGFACSQCGQPLFVYKLEQVSEKGKAYTNYFGRCNVAEHEKLILLAQLKPVKDSDEAVTYSLGKFGQRALDFYSIHVTKESTHPVKPLAQIAGNRYASGPVGKALSDACMGTIASFLSKYQDIIIEHQKVVKGNQKRLESLRELAGKENLEYPSVTLPPQPHTKEGVDFAYNEVIARVRMWVNLNLWQKLKLSRDDAKPLLRLKGFPSFPVVERRENEVDWWNTINEVKKLIDAKRDMGRVFWSGVTAEKRNTILEGYNYLPNENDHKKREGSLENPKKPAKRQFGDLLLYLEKKYAGDWGKVFDEAWERIDKKIAGLTSHIEREEARNAEDAQSKAVLTDWLRAKASFVLERLKEMDEKEFYACEIQLQKWYGDLRGNPFAVEAENRVVDISGFSIGSDGHSIQYRNLLAWKYLENGKREFYLLMNYGKKGRIRFTDGTDIKKSGKWQGLLYGGGKAKVIDLTFDPDDEQLIILPLAFGTRQGREFIWNDLLSLETGLIKLANGRVIEKTIYNKKIGRDEPALFVALTFERREVVDPSNIKPVNLIGVARGENIPAVIALTDPEGCPLPEFKDSSGGPTDILRIGEGYKEKQRAIQAAKEVEQRRAGGYSRKFASKSRNLADDMVRNSARDLFYHAVTHDAVLVFANLSRGFGRQGKRTFMTERQYTKMEDWLTAKLAYEGLTSKTYLSKTLAQYTSKTCSNCGFTITYADMDVMLVRLKKTSDGWATTLNNKELKAEYQITYYNRYKRQTVEKELSAELDRLSEESGNNDISKWTKGRRDEALFLLKKRFSHRPVQEQFVCLDCGHEVHAAEQAALNIARSWLFLNSNSTEFKSYKSGKQPFVGAWQAFYKRRLKEVWKPNA

SEQ ID NO: 242 - protein, 1210 aa, unidentified
  REGION 1..1210: note = Description of Unknown: uncultured Parcubacteria group bacterium sequence
MSKRHPRISGVKGYRLHAQRLEYTGKSGAMRTIKYPLYSSPSGGRTVPREIVSAINDDYVGLYGLSNFDDLYNAEKRNEEKVYSVLDFWYDCVQYGAVFSYTAPGLLKNVAEVRGGSYELTKTLKGSHLYDELQIDKVIKFLNKKEISRANGSLDKLKKDIIDCFKAEYRERHKDQCNKLADDIKNAKKDAGASLGERQKKLFRDFFGISEQSENDKPSFTNPLNLTCCLLPFDTVNNNRNRGEVLFNKLKEYAQKLDKNEGSLEMWEYIGIGNSGTAFSNFLGEGFLGRLRENKITELKKAMMDITDAWRGQEQEEELEKRLRILAALTIKLREPKFDNHWGGYRSDINGKLSSWLQNYINQTVKIKEDLKGHKKDLKKAKEMINRFGESDTKEEAVVSSLLESIEKIVPDDSADDEKPDIPAIAIYRRFLSDGRLTLNRFVQREDVQEALIKERLEAEKKKKPKKRKKKSDAEDEKETIDFKELFPHLAKPLKLVPNFYGDSKRELYKKYKNAAIYTDALWKAVEKIYKSAFSSSLKNSFFDTDFDKDFFIKRLQKIFSVYRRFNTDKWKPIVKNSFAPYCDIVSLAENEVLYKPKQSRSRKSAAIDKNRVRLPSTENIAKAGIALARELSVAGFDWKDLLKKEEHEEYIDLIELHKTALALLLAVTETQLDISALDFVENGTVKDFMKTRDGNLVLEGRFLEMFSQSIVFSELRGLAGLMSRKEFITRSAIQTMNGKQAELLYIPHEFQSAKITTPKEMSRAFLDLAPAEFATSLEPESLSEKSLLKLKQMRYYPHYFGYELTRTGQGIDGGVAENALRLEKSPVKKREIKCKQYKTLGRGQNKIVLYVRSSYYQTQFLEWFLHRPKNVQTDVAVSGSFLIDEKKVKTRWNYDALTVALEPVSGSERVFVSQPFTIFPEKSAEEEGQRYLGIDIGEYGIAYTALEITGDSAKILDQNFISDPQLKTLREEVKGLKLDQRRGTFAMPSTKIARIRESLVHSLRNRIHHLALKHKAKIVYELEVSRFEEGKQKIKKVYATLKKADVYSEIDADKNLQTTVWGKLAVASEISASYTSQFCGACKKLWRAEMQVDETITTQELIGTVRVIKGGTLIDAIKDFMRPPIFDENDTPFPKYRDFCDKHHISKKMRGNSCLFICPFCRANADADIQASQTIALLRYVKEEKKVEDYFERFRKLKNIKVLGQMKKI

SEQ ID NO: 243 - RNA, 117 nt, synthetic construct
  misc_feature 1..117: note = Description of Artificial Sequence: Synthetic polynucleotide
  source 1..117: mol_type = other RNA
  variation 98..117: note = a, c, u, or g
gttctgtcttttggtcaggacaaccgtctagctataagtgctgcagggtgtgagaaactcctattgctggacgatgtctcttacgaggcattagcacnnnnnnnnnnnnnnnnnnnn

SEQ ID NO: 244 - RNA, 108 nt, synthetic construct
  misc_feature 1..108: note = Description of Artificial Sequence: Synthetic polynucleotide
  source 1..108: mol_type = other RNA
  variation 89..108: note = a, c, u, or g
gacctatagggtcaatgaatctgtgcgtgtgccataagtaattaaaaattacccaccacaggagcacctgaaaacaggtgcttggcacnnnnnnnnnnnnnnnnnnnn

SEQ ID NO: 245 - RNA, 119 nt, synthetic construct
  misc_feature 1..119: note = Description of Artificial Sequence: Synthetic polynucleotide
  source 1..119: mol_type = other RNA
  variation 100..119: note = a, c, u, or g
gtctaaaggacagaatttttcaacgggtgtgccaatggccactttccaggtggcaaagcccgttgaacttctcaaaaagaacgatctgagaagtggcacnnnnnnnnnnnnnnnnnnnn

SEQ ID NO: 246 - protein, 1300 aa, unidentified
  REGION 1..1300: note = Description of Unknown: Cpf1 polypeptide sequence
MSIYQEFVNKYSLSKTLRFELIPQGKTLENIKARGLILDDEKRAKDYKKAKQIIDKYHQFFIEEILSSVCISEDLLQNYSDVYFKLKKSDDDNLQKDFKSAKDTIKKQISEYIKDSEKFKNLFNQNLIDAKKGQESDLILWLKQSKDNGIELFKANSDITDIDEALEIIKSFKGWTTYFKGFHENRKNVYSSNDIPTSIIYRIVDDNLPKFLENKAKYESLKDKAPEAINYEQIKKDLAEELTFDIDYKTSEVNQRVFSLDEVFEIANFNNYLNQSGITKFNTIIGGKFVNGENTKRKGINEYINLYSQQINDKTLKKYKMSVLFKQILSDTESKSFVIDKLEDDSDVVTTMQSFYEQIAAFKTVEEKSIKETLSLLFDDLKAQKLDLSKIYFKNDKSLTDLSQQVFDDYSVIGTAVLEYITQQIAPKNLDNPSKKEQELIAKKTEKAKYLSLETIKLALEEFNKHRDIDKQCRFEEILANFAAIPMIFDEIAQNKDNLAQISIKYQNQGKKDLLQASAEDDVKAIKDLLDQTNNLLHKLKIFHISQSEDKANILDKDEHFYLVFEECYFELANIVPLYNKIRNYITQKPYSDEKFKLNFENSTLANGWDKNKEPDNTAILFIKDDKYYLGVMNKKNNKIFDDKAIKENKGEGYKKIVYKLLPGANKMLPKVFFSAKSIKFYNPSEDILRIRNHSTHTKNGSPQKGYEKFEFNIEDCRKFIDFYKQSISKHPEWKDFGFRFSDTQRYNSIDEFYREVENQGYKLTFENISESYIDSVVNQGKLYLFQIYNKDFSAYSKGRPNLHTLYWKALFDERNLQDVVYKLNGEAELFYRKQSIPKKITHPAKEAIANKNKDNPKKESVFEYDLIKDKRFTEDKFFFHCPITINFKSSGANKFNDEINLLLKEKANDVHILSIDRGERHLAYYTLVDGKGNIIKQDTFNIIGNDRMKTNYHDKLAAIEKDRDSARKDWKKINNIKEMKEGYLSQVVHEIAKLVIEYNAIVVFEDLNFGFKRGRFKVEKQVYQKLEKMLIEKLNYLVFKDNEFDKTGGVLRAYQLTAPFETFKKMGKQTGIIYYVPAGFTSKICPVTGFVNQLYPKYESVSKSQEFFSKFDKICYNLDKGYFEFSFDYKNFGDKAAKGKWTIASFGSRLINFRNSDKNHNWDTREVYPTKELEKLLKDYSIEYGHGECIKAAICGESDKKFFAKLTSVLNTILQMRNSKTGTELDYLISPVADVNGNFFDSRQAPKNMPQDADANGAYHIGLKGLMLLGRIKNNQEGKKLNLVIKNEEYFEFVQNRNN

SEQ ID NO: 247 - protein, 1300 aa, synthetic construct
  REGION 1..1300: note = Description of Artificial Sequence: Synthetic polypeptide
MSIYQEFVNKYSLSKTLRFELIPQGKTLENIKARGLILDDEKRAKDYKKAKQIIDKYHQFFIEEILSSVCISEDLLQNYSDVYFKLKKSDDDNLQKDFKSAKDTIKKQISEYIKDSEKFKNLFNQNLIDAKKGQESDLILWLKQSKDNGIELFKANSDITDIDEALEIIKSFKGWTTYFKGFHENRKNVYSSNDIPTSIIYRIVDDNLPKFLENKAKYESLKDKAPEAINYEQIKKDLAEELTFDIDYKTSEVNQRVFSLDEVFEIANFNNYLNQSGITKFNTIIGGKFVNGENTKRKGINEYINLYSQQINDKTLKKYKMSVLFKQILSDTESKSFVIDKLEDDSDVVTTMQSFYEQIAAFKTVEEKSIKETLSLLFDDLKAQKLDLSKIYFKNDKSLTDLSQQVFDDYSVIGTAVLEYITQQIAPKNLDNPSKKEQELIAKKTEKAKYLSLETIKLALEEFNKHRDIDKQCRFEEILANFAAIPMIFDEIAQNKDNLAQISIKYQNQGKKDLLQASAEDDVKAIKDLLDQTNNLLHKLKIFHISQSEDKANILDKDEHFYLVFEECYFELANIVPLYNKIRNYITQKPYSDEKFKLNFENSTLANGWDKNKEPDNTAILFIKDDKYYLGVMNKKNNKIFDDKAIKENKGEGYKKIVYKLLPGANKMLPKVFFSAKSIKFYNPSEDILRIRNHSTHTKNGSPQKGYEKFEFNIEDCRKFIDFYKQSISKHPEWKDFGFRFSDTQRYNSIDEFYREVENQGYKLTFENISESYIDSVVNQGKLYLFQIYNKDFSAYSKGRPNLHTLYWKALFDERNLQDVVYKLNGEAELFYRKQSIPKKITHPAKEAIANKNKDNPKKESVFEYDLIKDKRFTEDKFFFHCPITINFKSSGANKFNDEINLLLKEKANDVHILSIARGERHLAYYTLVDGKGNIIKQDTFNIIGNDRMKTNYHDKLAAIEKDRDSARKDWKKINNIKEMKEGYLSQVVHEIAKLVIEYNAIVVFEDLNFGFKRGRFKVEKQVYQKLEKMLIEKLNYLVFKDNEFDKTGGVLRAYQLTAPFETFKKMGKQTGIIYYVPAGFTSKICPVTGFVNQLYPKYESVSKSQEFFSKFDKICYNLDKGYFEFSFDYKNFGDKAAKGKWTIASFGSRLINFRNSDKNHNWDTREVYPTKELEKLLKDYSIEYGHGECIKAAICGESDKKFFAKLTSVLNTILQMRNSKTGTELDYLISPVADVNGNFFDSRQAPKNMPQDADANGAYHIGLKGLMLLGRIKNNQEGKKLNLVIKNEEYFEFVQNRNN

SEQ ID NO: 248 - protein, 1300 aa, synthetic construct
  REGION 1..1300: note = Description of Artificial Sequence: Synthetic polypeptide
MSIYQEFVNKYSLSKTLRFELIPQGKTLENIKARGLILDDEKRAKDYKKAKQIIDKYHQFFIEEILSSVCISEDLLQNYSDVYFKLKKSDDDNLQKDFKSAKDTIKKQISEYIKDSEKFKNLFNQNLIDAKKGQESDLILWLKQSKDNGIELFKANSDITDIDEALEIIKSFKGWTTYFKGFHENRKNVYSSNDIPTSIIYRIVDDNLPKFLENKAKYESLKDKAPEAINYEQIKKDLAEELTFDIDYKTSEVNQRVFSLDEVFEIANFNNYLNQSGITKFNTIIGGKFVNGENTKRKGINEYINLYSQQINDKTLKKYKMSVLFKQILSDTESKSFVIDKLEDDSDVVTTMQSFYEQIAAFKTVEEKSIKETLSLLFDDLKAQKLDLSKIYFKNDKSLTDLSQQVFDDYSVIGTAVLEYITQQIAPKNLDNPSKKEQELIAKKTEKAKYLSLETIKLALEEFNKHRDIDKQCRFEEILANFAAIPMIFDEIAQNKDNLAQISIKYQNQGKKDLLQASAEDDVKAIKDLLDQTNNLLHKLKIFHISQSEDKANILDKDEHFYLVFEECYFELANIVPLYNKIRNYITQKPYSDEKFKLNFENSTLANGWDKNKEPDNTAILFIKDDKYYLGVMNKKNNKIFDDKAIKENKGEGYKKIVYKLLPGANKMLPKVFFSAKSIKFYNPSEDILRIRNHSTHTKNGSPQKGYEKFEFNIEDCRKFIDFYKQSISKHPEWKDFGFRFSDTQRYNSIDEFYREVENQGYKLTFENISESYIDSVVNQGKLYLFQIYNKDFSAYSKGRPNLHTLYWKALFDERNLQDVVYKLNGEAELFYRKQSIPKKITHPAKEAIANKNKDNPKKESVFEYDLIKDKRFTEDKFFFHCPITINFKSSGANKFNDEINLLLKEKANDVHILSIDRGERHLAYYTLVDGKGNIIKQDTFNIIGNDRMKTNYHDKLAAIEKDRDSARKDWKKINNIKEMKEGYLSQVVHEIAKLVIEYNAIVVFADLNFGFKRGRFKVEKQVYQKLEKMLIEKLNYLVFKDNEFDKTGGVLRAYQLTAPFETFKKMGKQTGIIYYVPAGFTSKICPVTGFVNQLYPKYESVSKSQEFFSKFDKICYNLDKGYFEFSFDYKNFGDKAAKGKWTIASFGSRLINFRNSDKNHNWDTREVYPTKELEKLLKDYSIEYGHGECIKAAICGESDKKFFAKLTSVLNTILQMRNSKTGTELDYLISPVADVNGNFFDSRQAPKNMPQDADANGAYHIGLKGLMLLGRIKNNQEGKKLNLVIKNEEYFEFVQNRNN

SEQ ID NO: 249 - protein, 1300 aa, synthetic construct
  REGION 1..1300: note = Description of Artificial Sequence: Synthetic polypeptide
MSIYQEFVNKYSLSKTLRFELIPQGKTLENIKARGLILDDEKRAKDYKKAKQIIDKYHQFFIEEILSSVCISEDLLQNYSDVYFKLKKSDDDNLQKDFKSAKDTIKKQISEYIKDSEKFKNLFNQNLIDAKKGQESDLILWLKQSKDNGIELFKANSDITDIDEALEIIKSFKGWTTYFKGFHENRKNVYSSNDIPTSIIYRIVDDNLPKFLENKAKYESLKDKAPEAINYEQIKKDLAEELTFDIDYKTSEVNQRVFSLDEVFEIANFNNYLNQSGITKFNTIIGGKFVNGENTKRKGINEYINLYSQQINDKTLKKYKMSVLFKQILSDTESKSFVIDKLEDDSDVVTTMQSFYEQIAAFKTVEEKSIKETLSLLFDDLKAQKLDLSKIYFKNDKSLTDLSQQVFDDYSVIGTAVLEYITQQIAPKNLDNPSKKEQELIAKKTEKAKYLSLETIKLALEEFNKHRDIDKQCRFEEILANFAAIPMIFDEIAQNKDNLAQISIKYQNQGKKDLLQASAEDDVKAIKDLLDQTNNLLHKLKIFHISQSEDKANILDKDEHFYLVFEECYFELANIVPLYNKIRNYITQKPYSDEKFKLNFENSTLANGWDKNKEPDNTAILFIKDDKYYLGVMNKKNNKIFDDKAIKENKGEGYKKIVYKLLPGANKMLPKVFFSAKSIKFYNPSEDILRIRNHSTHTKNGSPQKGYEKFEFNIEDCRKFIDFYKQSISKHPEWKDFGFRFSDTQRYNSIDEFYREVENQGYKLTFENISESYIDSVVNQGKLYLFQIYNKDFSAYSKGRPNLHTLYWKALFDERNLQDVVYKLNGEAELFYRKQSIPKKITHPAKEAIANKNKDNPKKESVFEYDLIKDKRFTEDKFFFHCPITINFKSSGANKFNDEINLLLKEKANDVHILSIDRGERHLAYYTLVDGKGNIIKQDTFNIIGNDRMKTNYHDKLAAIEKDRDSARKDWKKINNIKEMKEGYLSQVVHEIAKLVIEYNAIVVFEDLNFGFKRGRFKVEKQVYQKLEKMLIEKLNYLVFKDNEFDKTGGVLRAYQLTAPFETFKKMGKQTGIIYYVPAGFTSKICPVTGFVNQLYPKYESVSKSQEFFSKFDKICYNLDKGYFEFSFDYKNFGDKAAKGKWTIASFGSRLINFRNSDKNHNWDTREVYPTKELEKLLKDYSIEYGHGECIKAAICGESDKKFFAKLTSVLNTILQMRNSKTGTELDYLISPVADVNGNFFDSRQAPKNMPQDAAANGAYHIGLKGLMLLGRIKNNQEGKKLNLVIKNEEYFEFVQNRNN

SEQ ID NO: 250 - protein, 1300 aa, synthetic construct
  REGION 1..1300: note = Description of Artificial Sequence: Synthetic polypeptide
MSIYQEFVNKYSLSKTLRFELIPQGKTLENIKARGLILDDEKRAKDYKKAKQIIDKYHQFFIEEILSSVCISEDLLQNYSDVYFKLKKSDDDNLQKDFKSAKDTIKKQISEYIKDSEKFKNLFNQNLIDAKKGQESDLILWLKQSKDNGIELFKANSDITDIDEALEIIKSFKGWTTYFKGFHENRKNVYSSNDIPTSIIYRIVDDNLPKFLENKAKYESLKDKAPEAINYEQIKKDLAEELTFDIDYKTSEVNQRVFSLDEVFEIANFNNYLNQSGITKFNTIIGGKFVNGENTKRKGINEYINLYSQQINDKTLKKYKMSVLFKQILSDTESKSFVIDKLEDDSDVVTTMQSFYEQIAAFKTVEEKSIKETLSLLFDDLKAQKLDLSKIYFKNDKSLTDLSQQVFDDYSVIGTAVLEYITQQIAPKNLDNPSKKEQELIAKKTEKAKYLSLETIKLALEEFNKHRDIDKQCRFEEILANFAAIPMIFDEIAQNKDNLAQISIKYQNQGKKDLLQASAEDDVKAIKDLLDQTNNLLHKLKIFHISQSEDKANILDKDEHFYLVFEECYFELANIVPLYNKIRNYITQKPYSDEKFKLNFENSTLANGWDKNKEPDNTAILFIKDDKYYLGVMNKKNNKIFDDKAIKENKGEGYKKIVYKLLPGANKMLPKVFFSAKSIKFYNPSEDILRIRNHSTHTKNGSPQKGYEKFEFNIEDCRKFIDFYKQSISKHPEWKDFGFRFSDTQRYNSIDEFYREVENQGYKLTFENISESYIDSVVNQGKLYLFQIYNKDFSAYSKGRPNLHTLYWKALFDERNLQDVVYKLNGEAELFYRKQSIPKKITHPAKEAIANKNKDNPKKESVFEYDLIKDKRFTEDKFFFHCPITINFKSSGANKFNDEINLLLKEKANDVHILSIARGERHLAYYTLVDGKGNIIKQDTFNIIGNDRMKTNYHDKLAAIEKDRDSARKDWKKINNIKEMKEGYLSQVVHEIAKLVIEYNAIVVFADLNFGFKRGRFKVEKQVYQKLEKMLIEKLNYLVFKDNEFDKTGGVLRAYQLTAPFETFKKMGKQTGIIYYVPAGFTSKICPVTGFVNQLYPKYESVSKSQEFFSKFDKICYNLDKGYFEFSFDYKNFGDKAAKGKWTIASFGSRLINFRNSDKNHNWDTREVYPTKELEKLLKDYSIEYGHGECIKAAICGESDKKFFAKLTSVLNTILQMRNSKTGTELDYLISPVADVNGNFFDSRQAPKNMPQDADANGAYHIGLKGLMLLGRIKNNQEGKKLNLVIKNEEYFEFVQNRNN

SEQ ID NO: 251 - protein, 1300 aa, synthetic construct
  REGION 1..1300: note = Description of Artificial Sequence: Synthetic polypeptide
MSIYQEFVNKYSLSKTLRFELIPQGKTLENIKARGLILDDEKRAKDYKKAKQIIDKYHQFFIEEILSSVCISEDLLQNYSDVYFKLKKSDDDNLQKDFKSAKDTIKKQISEYIKDSEKFKNLFNQNLIDAKKGQESDLILWLKQSKDNGIELFKANSDITDIDEALEIIKSFKGWTTYFKGFHENRKNVYSSNDIPTSIIYRIVDDNLPKFLENKAKYESLKDKAPEAINYEQIKKDLAEELTFDIDYKTSEVNQRVFSLDEVFEIANFNNYLNQSGITKFNTIIGGKFVNGENTKRKGINEYINLYSQQINDKTLKKYKMSVLFKQILSDTESKSFVIDKLEDDSDVVTTMQSFYEQIAAFKTVEEKSIKETLSLLFDDLKAQKLDLSKIYFKNDKSLTDLSQQVFDDYSVIGTAVLEYITQQIAPKNLDNPSKKEQELIAKKTEKAKYLSLETIKLALEEFNKHRDIDKQCRFEEILANFAAIPMIFDEIAQNKDNLAQISIKYQNQGKKDLLQASAEDDVKAIKDLLDQTNNLLHKLKIFHISQSEDKANILDKDEHFYLVFEECYFELANIVPLYNKIRNYITQKPYSDEKFKLNFENSTLANGWDKNKEPDNTAILFIKDDKYYLGVMNKKNNKIFDDKAIKENKGEGYKKIVYKLLPGANKMLPKVFFSAKSIKFYNPSEDILRIRNHSTHTKNGSPQKGYEKFEFNIEDCRKFIDFYKQSISKHPEWKDFGFRFSDTQRYNSIDEFYREVENQGYKLTFENISESYIDSVVNQGKLYLFQIYNKDFSAYSKGRPNLHTLYWKALFDERNLQDVVYKLNGEAELFYRKQSIPKKITHPAKEAIANKNKDNPKKESVFEYDLIKDKRFTEDKFFFHCPITINFKSSGANKFNDEINLLLKEKANDVHILSIARGERHLAYYTLVDGKGNIIKQDTFNIIGNDRMKTNYHDKLAAIEKDRDSARKDWKKINNIKEMKEGYLSQVVHEIAKLVIEYNAIVVFEDLNFGFKRGRFKVEKQVYQKLEKMLIEKLNYLVFKDNEFDKTGGVLRAYQLTAPFETFKKMGKQTGIIYYVPAGFTSKICPVTGFVNQLYPKYESVSKSQEFFSKFDKICYNLDKGYFEFSFDYKNFGDKAAKGKWTIASFGSRLINFRNSDKNHNWDTREVYPTKELEKLLKDYSIEYGHGECIKAAICGESDKKFFAKLTSVLNTILQMRNSKTGTELDYLISPVADVNGNFFDSRQAPKNMPQDAAANGAYHIGLKGLMLLGRIKNNQEGKKLNLVIKNEEYFEFVQNRNN

SEQ ID NO: 252 - protein, 1300 aa, synthetic construct
  REGION 1..1300: note = Description of Artificial Sequence: Synthetic polypeptide
MSIYQEFVNKYSLSKTLRFELIPQGKTLENIKARGLILDDEKRAKDYKKAKQIIDKYHQFFIEEILSSVCISEDLLQNYSDVYFKLKKSDDDNLQKDFKSAKDTIKKQISEYIKDSEKFKNLFNQNLIDAKKGQESDLILWLKQSKDNGIELFKANSDITDIDEALEIIKSFKGWTTYFKGFHENRKNVYSSNDIPTSIIYRIVDDNLPKFLENKAKYESLKDKAPEAINYEQIKKDLAEELTFDIDYKTSEVNQRVFSLDEVFEIANFNNYLNQSGITKFNTIIGGKFVNGENTKRKGINEYINLYSQQINDKTLKKYKMSVLFKQILSDTESKSFVIDKLEDDSDVVTTMQSFYEQIAAFKTVEEKSIKETLSLLFDDLKAQKLDLSKIYFKNDKSLTDLSQQVFDDYSVIGTAVLEYITQQIAPKNLDNPSKKEQELIAKKTEKAKYLSLETIKLALEEFNKHRDIDKQCRFEEILANFAAIPMIFDEIAQNKDNLAQISIKYQNQGKKDLLQASAEDDVKAIKDLLDQTNNLLHKLKIFHISQSEDKANILDKDEHFYLVFEECYFELANIVPLYNKIRNYITQKPYSDEKFKLNFENSTLANGWDKNKEPDNTAILFIKDDKYYLGVMNKKNNKIFDDKAIKENKGEGYKKIVYKLLPGANKMLPKVFFSAKSIKFYNPSEDILRIRNHSTHTKNGSPQKGYEKFEFNIEDCRKFIDFYKQSISKHPEWKDFGFRFSDTQRYNSIDEFYREVENQGYKLTFENISESYIDSVVNQGKLYLFQIYNKDFSAYSKGRPNLHTLYWKALFDERNLQDVVYKLNGEAELFYRKQSIPKKITHPAKEAIANKNKDNPKKESVFEYDLIKDKRFTEDKFFFHCPITINFKSSGANKFNDEINLLLKEKANDVHILSIDRGERHLAYYTLVDGKGNIIKQDTFNIIGNDRMKTNYHDKLAAIEKDRDSARKDWKKINNIKEMKEGYLSQVVHEIAKLVIEYNAIVVFADLNFGFKRGRFKVEKQVYQKLEKMLIEKLNYLVFKDNEFDKTGGVLRAYQLTAPFETFKKMGKQTGIIYYVPAGFTSKICPVTGFVNQLYPKYESVSKSQEFFSKFDKICYNLDKGYFEFSFDYKNFGDKAAKGKWTIASFGSRLINFRNSDKNHNWDTREVYPTKELEKLLKDYSIEYGHGECIKAAICGESDKKFFAKLTSVLNTILQMRNSKTGTELDYLISPVADVNGNFFDSRQAPKNMPQDAAANGAYHIGLKGLMLLGRIKNNQEGKKLNLVIKNEEYFEFVQNRNN

SEQ ID NO: 253 - protein, 1300 aa, synthetic construct
  REGION 1..1300: note = Description of Artificial Sequence: Synthetic polypeptide
MSIYQEFVNKYSLSKTLRFELIPQGKTLENIKARGLILDDEKRAKDYKKAKQIIDKYHQFFIEEILSSVCISEDLLQNYSDVYFKLKKSDDDNLQKDFKSAKDTIKKQISEYIKDSEKFKNLFNQNLIDAKKGQESDLILWLKQSKDNGIELFKANSDITDIDEALEIIKSFKGWTTYFKGFHENRKNVYSSNDIPTSIIYRIVDDNLPKFLENKAKYESLKDKAPEAINYEQIKKDLAEELTFDIDYKTSEVNQRVFSLDEVFEIANFNNYLNQSGITKFNTIIGGKFVNGENTKRKGINEYINLYSQQINDKTLKKYKMSVLFKQILSDTESKSFVIDKLEDDSDVVTTMQSFYEQIAAFKTVEEKSIKETLSLLFDDLKAQKLDLSKIYFKNDKSLTDLSQQVFDDYSVIGTAVLEYITQQIAPKNLDNPSKKEQELIAKKTEKAKYLSLETIKLALEEFNKHRDIDKQCRFEEILANFAAIPMIFDEIAQNKDNLAQISIKYQNQGKKDLLQASAEDDVKAIKDLLDQTNNLLHKLKIFHISQSEDKANILDKDEHFYLVFEECYFELANIVPLYNKIRNYITQKPYSDEKFKLNFENSTLANGWDKNKEPDNTAILFIKDDKYYLGVMNKKNNKIFDDKAIKENKGEGYKKIVYKLLPGANKMLPKVFFSAKSIKFYNPSEDILRIRNHSTHTKNGSPQKGYEKFEFNIEDCRKFIDFYKQSISKHPEWKDFGFRFSDTQRYNSIDEFYREVENQGYKLTFENISESYIDSVVNQGKLYLFQIYNKDFSAYSKGRPNLHTLYWKALFDERNLQDVVYKLNGEAELFYRKQSIPKKITHPAKEAIANKNKDNPKKESVFEYDLIKDKRFTEDKFFFHCPITINFKSSGANKFNDEINLLLKEKANDVHILSIARGERHLAYYTLVDGKGNIIKQDTFNIIGNDRMKTNYHDKLAAIEKDRDSARKDWKKINNIKEMKEGYLSQVVHEIAKLVIEYNAIVVFADLNFGFKRGRFKVEKQVYQKLEKMLIEKLNYLVFKDNEFDKTGGVLRAYQLTAPFETFKKMGKQTGIIYYVPAGFTSKICPVTGFVNQLYPKYESVSKSQEFFSKFDKICYNLDKGYFEFSFDYKNFGDKAAKGKWTIASFGSRLINFRNSDKNHNWDTREVYPTKELEKLLKDYSIEYGHGECIKAAICGESDKKFFAKLTSVLNTILQMRNSKTGTELDYLISPVADVNGNFFDSRQAPKNMPQDAAANGAYHIGLKGLMLLGRIKNNQEGKKLNLVIKNEEYFEFVQNRNN

SEQ ID NO: 254 - protein, 1052 aa, synthetic construct
  REGION 1..1052: note = Description of Artificial Sequence: Synthetic polypeptide
KRNYILGLDIGITSVGYGIIDYETRDVIDAGVRLFKEANVENNEGRRSKRGARRLKRRRRHRIQRVKKLLFDYNLLTDHSELSGINPYEARVKGLSQKLSEEEFSAALLHLAKRRGVHNVNEVEEDTGNELSTKEQISRNSKALEEKYVAELQLERLKKDGEVRGSINRFKTSDYVKEAKQLLKVQKAYHQLDQSFIDTYIDLLETRRTYYEGPGEGSPFGWKDIKEWYEMLMGHCTYFPEELRSVKYAYNADLYNALNDLNNLVITRDENEKLEYYEKFQIIENVFKQKKKPTLKQIAKEILVNEEDIKGYRVTSTGKPEFTNLKVYHDIKDITARKEIIENAELLDQIAKILTIYQSSEDIQEELTNLNSELTQEEIEQISNLKGYTGTHNLSLKAINLILDELWHTNDNQIAIFNRLKLVPKKVDLSQQKEIPTTLVDDFILSPVVKRSFIQSIKVINAIIKKYGLPNDIIIELAREKNSKDAQKMINEMQKRNRQTNERIEEIIRTTGKENAKYLIEKIKLHDMQEGKCLYSLEAIPLEDLLNNPFNYEVDHIIPRSVSFDNSFNNKVLVKQEENSKKGNRTPFQYLSSSDSKISYETFKKHILNLAKGKGRISKTKKEYLLEERDINRFSVQKDFINRNLVDTRYATRGLMNLLRSYFRVNNLDVKVKSINGGFTSFLRRKWKFKKERNKGYKHHAEDALIIANADFIFKEWKKLDKAKKVMENQMFEEKQAESMPEIETEQEYKEIFITPHQIKHIKDFKDYKYSHRVDKKPNRELINDTLYSTRKDDKGNTLIVNNLNGLYDKDNDKLKKLINKSPEKLLMYHHDPQTYQKLKLIMEQYGDEKNPLYKYYEETGNYLTKYSKKDNGPVIKKIKYYGNKLNAHLDITDDYPNSRNKVVKLSLKPYRFDVYLDNGVYKFVTVKNLDVIKKENYYEVNSKCYEEAKKLKKISNQAEFIASFYNNDLIKINGELYRVIGVNNDLLNRIEVNMIDITYREYLENMNDKRPPRIIKTIASKTQSIKKYSTDILGNLYEVKSKKHPQIIKKG

SEQ ID NO: 255 - protein, 1052 aa, synthetic construct
  REGION 1..1052: note = Description of Artificial Sequence: Synthetic polypeptide
KRNYILGLDIGITSVGYGIIDYETRDVIDAGVRLFKEANVENNEGRRSKRGARRLKRRRRHRIQRVKKLLFDYNLLTDHSELSGINPYEARVKGLSQKLSEEEFSAALLHLAKRRGVHNVNEVEEDTGNELSTKEQISRNSKALEEKYVAELQLERLKKDGEVRGSINRFKTSDYVKEAKQLLKVQKAYHQLDQSFIDTYIDLLETRRTYYEGPGEGSPFGWKDIKEWYEMLMGHCTYFPEELRSVKYAYNADLYNALNDLNNLVITRDENEKLEYYEKFQIIENVFKQKKKPTLKQIAKEILVNEEDIKGYRVTSTGKPEFTNLKVYHDIKDITARKEIIENAELLDQIAKILTIYQSSEDIQEELTNLNSELTQEEIEQISNLKGYTGTHNLSLKAINLILDELWHTNDNQIAIFNRLKLVPKKVDLSQQKEIPTTLVDDFILSPVVKRSFIQSIKVINAIIKKYGLPNDIIIELAREKNSKDAQKMINEMQKRNRQTNERIEEIIRTTGKENAKYLIEKIKLHDMQEGKCLYSLEAIPLEDLLNNPFNYEVDHIIPRSVSFDNSFNNKVLVKQEEASKKGNRTPFQYLSSSDSKISYETFKKHILNLAKGKGRISKTKKEYLLEERDINRFSVQKDFINRNLVDTRYATRGLMNLLRSYFRVNNLDVKVKSINGGFTSFLRRKWKFKKERNKGYKHHAEDALIIANADFIFKEWKKLDKAKKVMENQMFEEKQAESMPEIETEQEYKEIFITPHQIKHIKDFKDYKYSHRVDKKPNRELINDTLYSTRKDDKGNTLIVNNLNGLYDKDNDKLKKLINKSPEKLLMYHHDPQTYQKLKLIMEQYGDEKNPLYKYYEETGNYLTKYSKKDNGPVIKKIKYYGNKLNAHLDITDDYPNSRNKVVKLSLKPYRFDVYLDNGVYKFVTVKNLDVIKKENYYEVNSKCYEEAKKLKKISNQAEFIASFYNNDLIKINGELYRVIGVNNDLLNRIEVNMIDITYREYLENMNDKRPPRIIKTIASKTQSIKKYSTDILGNLYEVKSKKHPQIIKKG

SEQ ID NO: 256 - protein, 1052 aa, synthetic construct
  REGION 1..1052: note = Description of Artificial Sequence: Synthetic polypeptide
KRNYILGLDIGITSVGYGIIDYETRDVIDAGVRLFKEANVENNEGRRSKRGARRLKRRRRHRIQRVKKLLFDYNLLTDHSELSGINPYEARVKGLSQKLSEEEFSAALLHLAKRRGVHNVNEVEEDTGNELSTKEQISRNSKALEEKYVAELQLERLKKDGEVRGSINRFKTSDYVKEAKQLLKVQKAYHQLDQSFIDTYIDLLETRRTYYEGPGEGSPFGWKDIKEWYEMLMGHCTYFPEELRSVKYAYNADLYNALNDLNNLVITRDENEKLEYYEKFQIIENVFKQKKKPTLKQIAKEILVNEEDIKGYRVTSTGKPEFTNLKVYHDIKDITARKEIIENAELLDQIAKILTIYQSSEDIQEELTNLNSELTQEEIEQISNLKGYTGTHNLSLKAINLILDELWHTNDNQIAIFNRLKLVPKKVDLSQQKEIPTTLVDDFILSPVVKRSFIQSIKVINAIIKKYGLPNDIIIELAREKNSKDAQKMINEMQKRNRQTNERIEEIIRTTGKENAKYLIEKIKLHDMQEGKCLYSLEAIPLEDLLNNPFNYEVDHIIPRSVSFDNSFNNKVLVKQEEASKKGNRTPFQYLSSSDSKISYETFKKHILNLAKGKGRISKTKKEYLLEERDINRFSVQKDFINRNLVDTRYATRGLMNLLRSYFRVNNLDVKVKSINGGFTSFLRRKWKFKKERNKGYKHHAEDALIIANADFIFKEWKKLDKAKKVMENQMFEEKQAESMPEIETEQEYKEIFITPHQIKHIKDFKDYKYSHRVDKKPNRKLINDTLYSTRKDDKGNTLIVNNLNGLYDKDNDKLKKLINKSPEKLLMYHHDPQTYQKLKLIMEQYGDEKNPLYKYYEETGNYLTKYSKKDNGPVIKKIKYYGNKLNAHLDITDDYPNSRNKVVKLSLKPYRFDVYLDNGVYKFVTVKNLDVIKKENYYEVNSKCYEEAKKLKKISNQAEFIASFYKNDLIKINGELYRVIGVNNDLLNRIEVNMIDITYREYLENMNDKRPPHIIKTIASKTQSIKKYSTDILGNLYEVKSKKHPQIIKKG

SEQ ID NO: 257 - protein, 1410 aa, synthetic construct
  REGION 1..1410: note = Description of Artificial Sequence: Synthetic polypeptide
EIGKATAKYFFYSNIMNFFKTEITLANGEIRKRPLIETNGETGEIVWDKGRDFATVRKVLSMPQVNIVKKTEVQTGGFSKESILPKRNSDKLIARKKDWDPKKYGGFMQPTVAYSVLVVAKVEKGKSKKLKSVKELLGITIMERSSFEKNPIDFLEAKGYKEVKKDLIIKLPKYSLFELENGRKRMLASAKFLQKGNELALPSKYVNFLYLASHYEKLKGSPEDNEQKQLFVEQHKHYLDEIIEQISEFSKRVILADANLDKVLSAYNKHRDKPIREQAENIIHLFTLTNLGAPRAFKYFDTTIARKEYRSTKEVLDATLIHQSITGLYETRIDLSQLGGDGGSGGSGGSGGSGGSGGSGGMDKKYSIGLAIGTNSVGWAVITDEYKVPSKKFKVLGNTDRHSIKKNLIGALLFDSGETAEATRLKRTARRRYTRRKNRICYLQEIFSNEMAKVDDSFFHRLEESFLVEEDKKHERHPIFGNIVDEVAYHEKYPTIYHLRKKLVDSTDKADLRLIYLALAHMIKFRGHFLIEGDLNPDNSDVDKLFIQLVQTYNQLFEENPINASGVDAKAILSARLSKSRRLENLIAQLPGEKKNGLFGNLIALSLGLTPNFKSNFDLAEDAKLQLSKDTYDDDLDNLLAQIGDQYADLFLAAKNLSDAILLSDILRVNTEITKAPLSASMIKRYDEHHQDLTLLKALVRQQLPEKYKEIFFDQSKNGYAGYIDGGASQEEFYKFIKPILEKMDGTEELLVKLNREDLLRKQRTFDNGSIPHQIHLGELHAILRRQEDFYPFLKDNREKIEKILTFRIPYYVGPLARGNSRFAWMTRKSEETITPWNFEEVVDKGASAQSFIERMTNFDKNLPNEKVLPKHSLLYEYFTVYNELTKVKYVTEGMRKPAFLSGEQKKAIVDLLFKTNRKVTVKQLKEDYFKKIECFDSVEISGVEDRFNASLGTYHDLLKIIKDKDFLDNEENEDILEDIVLTLTLFEDREMIEERLKTYAHLFDDKVMKQLKRRRYTGWGRLSRKLINGIRDKQSGKTILDFLKSDGFANRNFMQLIHDDSLTFKEDIQKAQVSGQGDSLHEHIANLAGSPAIKKGILQTVKVVDELVKVMGRHKPENIVIEMARENQTTQKGQKNSRERMKRIEEGIKELGSQILKEHPVENTQLQNEKLYLYYLQNGRDMYVDQELDINRLSDYDVDHIVPQSFLKDDSIDNKVLTRSDKNRGKSDNVPSEEVVKKMKNYWRQLLNAKLITQRKFDNLTKAERGGLSELDKAGFIKRQLVETRQITKHVAQILDSRMNTKYDENDKLIREVKVITLKSKLVSDFRKDFQFYKVREINNYHHAHDAYLNAVVGTALIKKYPKLESEFVYGDYKVYDVRKMIAKSEQEGADKRTADGSEFESPKKKRKV

SEQ ID NO: 258 - protein, 1129 aa, synthetic construct
  REGION 1..1129: note = Description of Artificial Sequence: Synthetic polypeptide
MAVKSIKVKLRLDDMPEIRAGLWKLHKEVNAGVRYYTEWLSLLRQENLYRRSPNGDGEQECDKTAEECKAELLERLRARQVENGHRGPAGSDDELLQLARQLYELLVPQAIGAKGDAQQIARKFLSPLADKDAVGGLGIAKAGNKPRWVRMREAGEPGWEEEKEKAETRKSADRTADVLRALADFGLKPLMRVYTDSEMSSVEWKPLRKGQAVRTWDRDMFQQAIERMMSWESWNQRVGQEYAKLVEQKNRFEQKNFVGQEHLVHLVNQLQQDMKEASPGLESKEQTAHYVTGRALRGSDKVFEKWGKLAPDAPFDLYDAEIKNVQRRNTRRFGSHDLFAKLAEPEYQALWREDASFLTRYAVYNSILRKLNHAKMFATFTLPDATAHPIWTRFDKLGGNLHQYTFLFNEFGERRHAIRFHKLLKVENGVAREVDDVTVPISMSEQLDNLLPRDPNEPIALYFRDYGAEQHFTGEFGGAKIQCRRDQLAHMHRRRGARDVYLNVSVRVQSQSEARGERRPPYAAVFRLVGDNHRAFVHFDKLSDYLAEHPDDGKLGSEGLLSGLRVMSVDLGLRTSASISVFRVARKDELKPNSKGRVPFFFPIKGNDNLVAVHERSQLLKLPGETESKDLRAIREERQRTLRQLRTQLAYLRLLVRCGSEDVGRRERSWAKLIEQPVDAANHMTPDWREAFENELQKLKSLHGICSDKEWMDAVYESVRRVWRHMGKQVRDWRKDVRSGERPKIRGYAKDVVGGNSIEQIEYLERQYKFLKSWSFFGKVSGQVIRAEKGSRFAITLREHIDHAKEDRLKKLADRIIMEALGYVYALDERGKGKWVAKYPPCQLILLEELSEYQFNNDRPPSENNQLMQWSHRGVFQELINQAQVHDLLVGTMYAAFSSRFDARTGAPGIRCRRVPARCTQEHNPEPFPWWLNKFVVEHTLDACPLRADDLIPTGEGEIFVSPFSAEEGDFHQIHADLNAAQNLQQRLWSDFDISQIRLRCDWGEVDGELVLIPRLTGKRTADSYSNKVFYTNTGVTYYERERGKKRRKVFAQEKLSEEEAELLVEADEAREKSVVLMRDPSGIINRGNWTRQKEFWSMVNQRIEGYLVKQIRSRVPLQDSACENTGDI

SEQ ID NO: 259 - protein, 1129 aa, synthetic construct
  REGION 1..1129: note = Description of Artificial Sequence: Synthetic polypeptide
MAVKSMKVKLRLDNMPEIRAGLWKLHTEVNAGVRYYTEWLSLLRQENLYRRSPNGDGEQECYKTAEECKAELLERLRARQVENGHCGPAGSDDELLQLARQLYELLVPQAIGAKGDAQQIARKFLSPLADKDAVGGLGIAKAGNKPRWVRMREAGEPGWEEEKAKAEARKSTDRTADVLRALADFGLKPLMRVYTDSDMSSVQWKPLRKGQAVRTWDRDMFQQAIERMMSWESWNQRVGEAYAKLVEQKSRFEQKNFVGQEHLVQLVNQLQQDMKEASHGLESKEQTAHYLTGRALRGSDKVFEKWEKLDPDAPFDLYDTEIKNVQRRNTRRFGSHDLFAKLAEPKYQALWREDASFLTRYAVYNSIVRKLNHAKMFATFTLPDATAHPIWTRFDKLGGNLHQYTFLFNEFGEGRHAIRFQKLLTVEDGVAKEVDDVTVPISMSAQLDDLLPRDPHELVALYFQDYGAEQHLAGEFGGAKIQYRRDQLNHLHARRGARDVYLNLSVRVQSQSEARGERRPPYAAVFRLVGDNHRAFVHFDKLSDYLAEHPDDGKLGSEGLLSGLRVMSVDLGLRTSASISVFRVARKDELKPNSEGRVPFCFPIEGNENLVAVHERSQLLKLPGETESKDLRAIREERQRTLRQLRTQLAYLRLLVRCGSEDVGRRERSWAKLIEQPMDANQMTPDWREAFEDELQKLKSLYGICGDREWTEAVYESVRRVWRHMGKQVRDWRKDVRSGERPKIRGYQKDVVGGNSIEQIEYLERQYKFLKSWSFFGKVSGQVIRAEKGSRFAITLREHIDHAKEDRLKKLADRIIMEALGYVYALDDERGKGKWVAKYPPCQLILLEELSEYQFNNDRPPSENNQLMQWSHRGVFQELLNQAQVHDLLVGTMYAAFSSRFDARTGAPGIRCRRVPARCAREQNPEPFPWWLNKFVAEHKLDGCPLRADDLIPTGEGEFFVSPFSAEEGDFHQIHADLNAAQNLQRRLWSDFDISQIRLRCDWGEVDGEPVLIPRTTGKRTADSYGNKVFYTKTGVTYYERERGKKRRKVFAQEELSEEEAELLVEADEAREKSVVLMRDPSGIINRGDWTRQKEFWSMVNQRIEGYLVKQIRSRVRLQESACENTGDI

SEQ ID NO: 260 - protein, 1140 aa, synthetic construct
  REGION 1..1140: note = Description of Artificial Sequence: Synthetic polypeptide
MAPKKKRKVGIHGVPAAATRSFILKIEPNEEVKKGLWKTHEVLNHGIAYYMNILKLIRQEAIYEHHEQDPKNPKKVSKAEIQAELWDFVLKMQKCNSFTHEVDKDEVFNILRELYEELVPSSVEKKGEANQLSNKFLYPLVDPNSQSGKGTASSGRKPRWYNLKIAGDPSWEEEKKKWEEDKKKDPLAKILGKLAEYGLIPLFIPYTDSNEPIVKEIKWMEKSRNQSVRRLDKDMFIQALERFLSWESWNLKVKEEYEKVEKEYKTLEERIKEDIQALKALEQYEKERQEQLLRDTLNTNEYRLSKRGLRGWREIIQKWLKMDENEPSEKYLEVFKDYQRKHPREAGDYSVYEFLSKKENHFIWRNHPEYPYLYATFCEIDKKKKDAKQQATFTLADPINHPLWVRFEERSGSNLNKYRILTEQLHTEKLKKKLTVQLDRLIYPTESGGWEEKGKVDIVLLPSRQFYNQIFLDIEEKGKHAFTYKDESIKFPLKGTLGGARVQFDRDHLRRYPHKVESGNVGRIYFNMTVNIEPTESPVSKSLKIHRDDFPKVVNFKPKELTEWIKDSKGKKLKSGIESLEIGLRVMSIDLGQRQAAAASIFEVVDQKPDIEGKLFFPIKGTELYAVHRASFNIKLPGETLVKSREVLRKAREDNLKLMNQKLNFLRNVLHFQQFEDITEREKRVTKWISRQENSDVPLVYQDELIQIRELMYKPYKDWVAFLKQLHKRLEVEIGKEVKHWRKSLSDGRKGLYGISLKNIDEIDRTRKFLLRWSLRPTEPGEVRRLEPGQRFAIDQLNHLNALKEDRLKKMANTIIMHALGYCYDVRKKKWQAKNPACQIILFEDLSNYNPYEERSRFENSKLMKWSRREIPRQVALQGEIYGLQVGEVGAQFSSRFHAKTGSPGIRCSVVTKEKLQDNRFFKNLQREGRLTLDKIAVLKEGDLYPDKGGEKFISLSKDRKCVTTHADINAAQNLQKRFWTRTHGFYKVYCKAYQVDGQTVYIPESKDQKQKIIEEFGEGYFILKDGVYEWVNAGKLKIKKGSSKQSSSELVDSDILKDSFDLASELKGEKLMLYRDPSGNVFPSDKWMAAGVFFGKLERILISKLTNQYSISTIEDDSSKQSMKRPAATKKAGQAKKKK

SEQ ID NO: 261 - DNA, 47 bp, synthetic construct
  misc_feature 1..47: note = Description of Artificial Sequence: Synthetic oligonucleotide
  source 1..47: mol_type = other DNA
gggaaataagagagaaaagaagagtaagaagaaatataagagccacc

SEQ ID NO: 262 - DNA, 101 bp, synthetic construct
  misc_feature 1..101: note = Description of Artificial Sequence: Synthetic polynucleotide
  source 1..101: mol_type = other DNA
gctggagcctcggtggccatgcttcttgccccttgggcctccccccagcccctcctccccttcctgcacccgtacccccgtggtctttgaataaagtctga

SEQ ID NO: 263 - DNA, 3420 bp, synthetic construct
  misc_feature 1..3420: note = Description of Artificial Sequence: Synthetic polynucleotide
  source 1..3420: mol_type = other DNA
atggccccaaagaagaagcggaaggtcggtatccacggagtcccagcagccgccaccagatccttcatcctgaagatcgagcccaacgaggaagtgaagaaaggcctctggaaaacccacgaggtgctgaaccacggaatcgcctactacatgaatatcctgaagctgatccggcaagaggccatctacgagcaccacgagcaggaccccaagaatcccaagaaggtgtccaaggccgagatccaggccgagctgtgggatttcgtgctgaagatgcagaagtgcaacagcttcacacacgaggtggacaaggacgaggtgttcaacatcctgagagagctgtacgaggaactggtgcccagcagcgtggaaaagaagggcgaagccaaccagctgagcaacaagtttctgtaccctctggtggaccccaacagccagtctggaaagggaacagccagcagcggcagaaagcccagatggtacaacctgaagattgccggcgatccctcctgggaagaagagaagaagaagtgggaagaagataagaaaaaggacccgctggccaagatcctgggcaagctggctgagtacggactgatccctctgttcatcccctacaccgacagcaacgagcccatcgtgaaagaaatcaagtggatggaaaagtcccggaaccagagcgtgcggcggctggataaggacatgttcattcaggccctggaacggttcctgagctgggagagctggaacctgaaagtgaaagaggaatacgagaaggtcgagaaagagtacaagaccctggaagagaggatcaaagaggacatccaggctctgaaggctctggaacagtatgagaaagagcggcaagaacagctgctgcgggacaccctgaacaccaacgagtaccggctgagcaagagaggccttagaggctggcgggaaatcatccagaaatggctgaaaatggacgagaacgagccctccgagaagtacctggaagtgttcaaggactaccagcggaagcaccctagagaggccggcgattacagcgtgtacgagttcctgtccaagaaagagaaccacttcatctggcggaatcaccctgagtacccctacctgtacgccaccttctgcgagatcgacaagaaaaagaaggacgccaagcagcaggccaccttcacactggccgatcctatcaatcaccctctgtgggtccgattcgaggaaagaagcggcagcaacctgaacaagtacagaatcctgaccgagcagctgcacaccgagaagctgaagaaaaagctgacagtgcagctggaccggctgatctaccctacagaatctggcggctgggaagagaagggcaaagtggacattgtgctgctgcccagccggcagttctacaaccagatcttcctggacatcgaggaaaagggcaagcacgccttcacctacaaggatgagagcatcaagttccctctgaagggcacactcggcggagccagagtgcagttcgacagagatcacctgagaagataccctcacaaggtggaaagcggcaacgtgggcagaatctacttcaacatgaccgtgaacatcgagcctacagagtccccagtgtccaagtctctgaagatccaccgggacgacttccccaaggtggtcaacttcaagcccaaagaactgaccgagtggatcaaggacagcaagggcaagaaactgaagtccggcatcgagtccctggaaatcggcctgagagtgatgagcatcgacctgggacagagacaggccgctgccgcctctattttcgaggtggtggatcagaagcccgacatcgaaggcaagctgtttttcccaatcaagggcaccgagctgtatgccgtgcacagagccagcttcaacatcaagctgcccggcgagacactggtcaagagcagagaagtgctgcggaaggccagagaggacaatctgaaactgatgaaccagaagctcaacttcctgcggaacgtgctgcacttccagcagttcgaggacatcaccgagagagagaagcgggtcaccaagtggatcagcagacaagagaacagcgacgtgcccctggtgtaccaggatgagctgatccagatccgcgagctgatgtacaagccttacaaggactgggtcgccttcctgaagcagctccacaagagactggaagtcgagatcggcaaagaagtgaagcactggcggaagtccctgagcgacggaagaaagggcctgtacggcatctccctgaagaacatcgacgagatcgatcggacccggaagttcctgctgagatggtccctgaggcctaccgaacctggcgaagtgcgtagactggaacccggccagagattcgccatcgaccagctgaatcacctgaacgccctgaaagaagatcggctgaagaagatggccaacaccatcatcatgcacgccctgggctactgctacgacgtgcggaagaagaaatggcaggctaagaaccccgcctgccagatcatcctgttcgaggatctgagcaactacaacccctacgaggaaaggtcccgcttcgagaacagcaagctcatgaagtggtccagacgcgagatccccagacaggttgcactgcagggcgagatctatggcctgcaagtgggagaagtgggcgctcagttcagcagcagattccacgccaagacaggcagccctggcatcagatgtagcgtcgtgaccaaagagaagctgcaggacaatcggttcttcaagaatctgcagagagagggcagactgaccctggacaaaatcgccgtgctgaaagagggcgatctgtacccagacaaaggcggcgagaagttcatcagcctgagcaaggatcggaagtgcgtgaccacacacgccgacatcaacgccgctcagaacctgcagaagcggttctggacaagaacccacggcttctacaaggtgtactgcaaggcctaccaggtggacggccagaccgtgtacatccctgagagcaaggaccagaagcagaagatcatcgaagagttcggcgagggctacttcattctgaaggacggggtgtacgaatgggtcaacgccggcaagctgaaaatcaagaagggcagctccaagcagagcagcagcgagctggtggatagcgacatcctgaaagacagcttcgacctggcctccgagctgaaaggcgaaaagctgatgctgtacagggaccccagcggcaatgtgttccccagcgacaaatggatggccgctggcgtgttcttcggaaagctggaacgcatcctgatcagcaagctgaccaaccagtactccatcagcaccatcgaggacgacagcagcaagcagtctatgaaaaggccggcggccacgaaaaaggccggccaggcaaaaaagaaaaag

SEQ ID NO: 264 - protein, 1112 aa, synthetic construct
  REGION 1..1112: note = Description of Artificial Sequence: Synthetic polypeptide
MAIRSIKLKMKTNSGTDSIYLRKALWRTHQLINEGIAYYMNLLTLYRQEAIGDKTKEAYQAELINIIRNQQRNNGSSEEHGSDQEILALLRQLYELIIPSSIGESGDANQLGNKFLYPLVDPNSQSGKGTSNAGRKPRWKRLKEEGNPDWELEKKKDEERKAKDPTVKIFDNLNKYGLLPLFPLFTNIQKDIEWLPLGKRQSVRKWDKDMFIQAIERLLSWESWNRRVADEYKQLKEKTESYYKEHLTGGEEWIEKIRKFEKERNMELEKNAFAPNDGYFITSRQIRGWDRVYEKWSKLPESASPEELWKVVAEQQNKMSEGFGDPKVFSFLANRENRDIWRGHSERIYHIAAYNGLQKKLSRTKEQATFTLPDAIEHPLWIRYESPGGTNLNLFKLEEKQKKNYYVTLSKIIWPSEEKWIEKENIEIPLAPSIQFNRQIKLKQHVKGKQEISFSDYSSRISLDGVLGGSRIQFNRKYIKNHKELLGEGDIGPVFFNLVVDVAPLQETRNGRLQSPIGKALKVISSDFSKVIDYKPKELMDWMNTGSASNSFGVASLLEGMRVMSIDMGQRTSASVSIFEVVKELPKDQEQKLFYSINDTELFAIHKRSFLLNLPGEVVTKNNKQQRQERRKKRQFVRSQIRMLANVLRLETKKTPDERKKAIHKLMEIVQSYDSWTASQKEVWEKELNLLTNMAAFNDEIWKESLVELHHRIEPYVGQIVSKWRKGLSEGRKNLAGISMWNIDELEDTRRLLISWSKRSRTPGEANRIETDEPFGSSLLQHIQNVKDDRLKQMANLIIMTALGFKYDKEEKDRYKRWKETYPACQIILFENLNRYLFNLDRSRRENSRLMKWAHRSIPRTVSMQGEMFGLQVGDVRSEYSSRFHAKTGAPGIRCHALTEEDLKAGSNTLKRLIEDGFINESELAYLKKGDIIPSQGGELFVTLSKRYKKDSDNNELTVIHADINAAQNLQKRFWQQNSEVYRVPCQLARMGEDKLYIPKSQTETIKKYFGKGSFVKNNTEQEVYKWEKSEKMKIKTDTTFDLQDLDGFEDISKTIELAQEQQKKYLTMFRDPSGYFFNNETWRPQKEYWSIVNNIIKSCLKKKILSNKVEL

SEQ ID NO: 265 - protein, 1108 aa, synthetic construct
  REGION 1..1108: note = Description of Artificial Sequence: Synthetic polypeptide
MATRSFILKIEPNEEVKKGLWKTHEVLNHGIAYYMNILKLIRQEAIYEHHEQDPKNPKKVSKAEIQAELWDFVLKMQKCNSFTHEVDKDVVFNILRELYEELVPSSVEKKGEANQLSNKFLYPLVDPNSQSGKGTASSGRKPRWYNLKIAGDPSWEEEKKKWEEDKKKDPLAKILGKLAEYGLIPLFIPFTDSNEPIVKEIKWMEKSRNQSVRRLDKDMFIQALERFLSWESWNLKVKEEYEKVEKEHKTLEERIKEDIQAFKSLEQYEKERQEQLLRDTLNTNEYRLSKRGLRGWREIIQKWLKMDENEPSEKYLEVFKDYQRKHPREAGDYSVYEFLSKKENHFIWRNHPEYPYLYATFCEIDKKKKDAKQQATFTLADPINHPLWVRFEERSGSNLNKYRILTEQLHTEKLKKKLTVQLDRLIYPTESGGWEEKGKVDIVLLPSRQFYNQIFLDIEEKGKHAFTYKDESIKFPLKGTLGGARVQFDRDHLRRYPHKVESGNVGRIYFNMTVNIEPTESPVSKSLKIHRDDFPKFVNFKPKELTEWIKDSKGKKLKSGIESLEIGLRVMSIDLGQRQAAAASIFEVVDQKPDIEGKLFFPIKGTELYAVHRASFNIKLPGETLVKSREVLRKAREDNLKLMNQKLNFLRNVLHFQQFEDITEREKRVTKWISRQENSDVPLVYQDELIQIRELMYKPYKDWVAFLKQLHKRLEVEIGKEVKHWRKSLSDGRKGLYGISLKNIDEIDRTRKFLLRWSLRPTEPGEVRRLEPGQRFAIDQLNHLNALKEDRLKKMANTIIMHALGYCYDVRKKKWQAKNPACQIILFEDLSNYNPYEERSRFENSKLMKWSRREIPRQVALQGEIYGLQVGEVGAQFSSRFHAKTGSPGIRCSVVTKEKLQDNRFFKNLQREGRLTLDKIAVLKEGDLYPDKGGEKFISLSKDRKLVTTHADINAAQNLQKRFWTRTHGFYKVYCKAYQVDGQTVYIPESKDQKQKIIEEFGEGYFILKDGVYEWGNAGKLKIKKGSSKQSSSELVDSDILKDSFDLASELKGEKLMLYRDPSGNVFPSDKWMAAGVFFGKLERILISKLTNQYSISTIEDDSSKQSM

SEQ ID NO: 266 - protein, 1302 aa, synthetic construct
  REGION 1..1302: note = Description of Artificial Sequence: Synthetic polypeptide
MQTKKTHLHLISAKASRKYRRTIACLSDTAKKDLERRKQSGAADPAQELSCLKTIKFKLEVPEGSKLPSFDRISQIYNALETIEKGSLSYLLFALILSGFRIFPNSSAAKTFASSSCYKNDQFASQIKEIFGEMVKNFIPSELESILKKGRRKNNKDWTEENIKRVLNSEFGRKNSEGSSALFDSFLSKFSQELFRKFDSWNEVNKKYLEAAELLDSMLASYGPFDSVCKMIGDSDSRNSLPDKSTIAFTNNAEITVDIESSVMPYMAIAALLREYRQSKSKAAPVAYVQSHLTTTNGNGLSWFFKFGLDLIRKAPVSSKQSTSDGSKSLQELFSVPDDKLDGLKFIKEACEALPEASLLCGEKGELLGYQDFRTSFAGHIDSWVANYVNRLFELIELVNQLPESIKLPSILTQKNHNLVASLGLQEAEVSHSLELFEGLVKNVRQTLKKLAGIDISSSPNEQDIKEFYAFSDVLNRLGSIRNQIENAVQTAKKDKIDLESAIEWKEWKKLKKLPKLNGLGGGVPKQQELLDKALESVKQIRHYQRIDFERVIQWAVNEHCLETVPKFLVDAEKKKINKESSTDFAAKENAVRFLLEGIGAAARGKTDSVSKAAYNWFVVNNFLAKKDLNRYFINCQGCIYKPPYSKRRSLAFALRSDNKDTIEVVWEKFETFYKEISKEIEKFNIFSQEFQTFLHLENLRMKLLLRRIQKPIPAEIAFFSLPQEYYDSLPPNVAFLALNQEITPSEYITQFNLYSSFLNGNLILLRRSRSYLRAKFSWVGNSKLIYAAKEARLWKIPNAYWKSDEWKMILDSNVLVFDKAGNVLPAPTLKKVCEREGDLRLFYPLLRQLPHDWCYRNPFVKSVGREKNVIEVNKEGEPKVASALPGSLFRLIGPAPFKSLLDDCFFNPLDKDLRECMLIVDQEISQKVEAQKVEASLESCTYSIAVPIRYHLEEPKVSNQFENVLAIDQGEAGLAYAVFSLKSIGEAETKPIAVGTIRIPSIRRLIHSVSTYRKKKQRLQNFKQNYDSTAFIMRENVTGDVCAKIVGLMKEFNAFPVLEYDVKNLESGSRQLSAVYKAVNSHFLYFKEPGRDALRKQLWYGGDSWTIDGIEIVTRERKEDGKEGVEKIVPLKVFPGRSVSARFTSKTCSCCGRNVFDWLFTEKKAKTNKKFNVNSKGELTTADGVIQLFEADRSKGPKFYARRKERTPLTKPIAKGSYSLEEIERRVRTNLRRAPKSKQSRDTSQSQYFCVYKDCALHFSGMQADENAAINIGRRFLTALRKNRRSDFPSNVKISDRLLDN

SEQ ID NO: 267 - protein, 1218 aa, synthetic construct
  REGION 1..1218: note = Description of Artificial Sequence: Synthetic polypeptide
MTKHSIPLHAFRNSGADARKWKGRIALLAKRGKETMRTLQFPLEMSEPEAAAINTTPFAVAYNAIEGTGKGTLFDYWAKLHLAGFRFFPSGGAATIFRQQAVFEDASWNAAFCQQSGKDWPWLVPSKLYERFTKAPREVAKKDGSKKSIEFTQENVANESHVSLVGASITDKTPEDQKEFFLKMAGALAEKFDSWKSANEDRIVAMKVIDEFLKSEGLHLPSLENIAVKCSVETKPDNATVAWHDAPMSGVQNLAIGVFATCASRIDNIYDLNGGKLSKLIQESATTPNVTALSWLFGKGLEYFRTTDIDTIMQDFNIPASAKESIKPLVESAQAIPTMTVLGKKNYAPFRPNFGGKIDSWIANYASRLMLLNDILEQIEPGFELPQALLDNETLMSGIDMTGDELKELIEAVYAWVDAAKQGLATLLGRGGNVDDAVQTFEQFSAMMDTLNGTLNTISARYVRAVEMAGKDEARLEKLIECKFDIPKWCKSVPKLVGISGGLPKVEEEIKVMNAAFKDVRARMFVRFEEIAAYVASKGAGMDVYDALEKRELEQIKKLKSAVPERAHIQAYRAVLHRIGRAVQNCSEKTKQLFSSKVIEMGVFKNPSHLNNFIFNQKGAIYRSPFDRSRHAPYQLHADKLLKNDWLELLAEISATLMASESTEQMEDALRLERTRLQLQLSGLPDWEYPASLAKPDIEVEIQTALKMQLAKDTVTSDVLQRAFNLYSSVLSGLTFKLLRRSFSLKMRFSVADTTQLIYVPKVCDWAIPKQYLQAEGEIGIAARVVTESSPAKMVTEVEMKEPKALGHFMQQAPHDWYFDASLGGTQVAGRIVEKGKEVGKERKLVGYRMRGNSAYKTVLDKSLVGNTELSQCSMIIEIPYTQTVDADFRAQVQAGLPKVSINLPVKETITASNKDEQMLFDRFVAIDLGERGLGYAVFDAKTLELQESGHRPIKAITNLLNRTHHYEQRPNQRQKFQAKFNVNLSELRENTVGDVCHQINRICAYYNAFPVLEYMVPDRLDKQLKSVYESVTNRYIWSSTDAHKSARVQFWLGGETWEHPYLKSAKDKKPLVLSPGRGASGKGTSQTCSCCGRNPFDLIKDMKPRAKIAVVDGKAKLENSELKLFERNLESKDDMLARRHRNERAGMEQPLTPGNYTVDEIKALLRANLRRAPKNRRTKDTTVSEYHCVFSDCGKTMHADENAAVNIGGKFIADIEK

SEQ ID NO: 268 - protein, 1252 aa, synthetic construct
  REGION 1..1252: note = Description of Artificial Sequence: Synthetic polypeptide
MTKLRHRQKKLTHDWAGSKKREVLGSNGKLQNPLLMPVKKGQVTEFRKAFSAYARATKGEMTDGRKNMFTHSFEPFKTKPSLHQCELADKAYQSLHSYLPGSLAHFLLSAHALGFRIFSKSGEATAFQASSKIEAYESKLASELACVDLSIQNLTISTLFNALTTSVRGKGEETSADPLIARFYTLLTGKPLSRDTQGPERDLAEVISRKIASSFGTWKEMTANPLQSLQFFEEELHALDANVSLSPAFDVLIKMNDLQGDLKNRTIVFDPDAPVFEYNAEDPADIIIKLTARYAKEAVIKNQNVGNYVKNAITTTNANGLGWLLNKGLSLLPVSTDDELLEFIGVERSHPSCHALIELIAQLEAPELFEKNVFSDTRSEVQGMIDSAVSNHIARLSSSRNSLSMDSEELERLIKSFQIHTPHCSLFIGAQSLSQQLESLPEALQSGVNSADILLGSTQYMLTNSLVEESIATYQRTLNRINYLSGVAGQINGAIKRKAIDGEKIHLPAAWSELISLPFIGQPVIDVESDLAHLKNQYQTLSNEFDTLISALQKNFDLNFNKALLNRTQHFEAMCRSTKKNALSKPEIVSYRDLLARLTSCLYRGSLVLRRAGIEVLKKHKIFESNSELREHVHERKHFVFVSPLDRKAKKLLRLTDSRPDLLHVIDEILQHDNLENKDRESLWLVRSGYLLAGLPDQLSSSFINLPIITQKGDRRLIDLIQYDQINRDAFVMLVTSAFKSNLSGLQYRANKQSFVVTRTLSPYLGSKLVYVPKDKDWLVPSQMFEGRFADILQSDYMVWKDAGRLCVIDTAKHLSNIKKSVFSSEEVLAFLRELPHRTFIQTEVRGLGVNVDGIAFNNGDIPSLKTFSNCVQVKVSRTNTSLVQTLNRWFEGGKVSPPSIQFERAYYKKDDQIHEDAAKRKIRFQMPATELVHASDDAGWTPSYLLGIDPGEYGMGLSLVSINNGEVLDSGFIHINSLINFASKKSNHQTKVVPRQQYKSPYANYLEQSKDSAAGDIAHILDRLIYKLNALPVFEALSGNSQSAADQVWTKVLSFYTWGDNDAQNSIRKQHWFGASHWDIKGMLRQPPTEKKPKPYIAFPGSQVSSYGNSQRCSCCGRNPIEQLREMAKDTSIKELKIRNSEIQLFDGTIKLFNPDPSTVIERRRHNLGPSRIPVADRTFKNISPSSLEFKELITIVSRSIRHSPEFIAKKRGIGSEYFCAYSDCNSSLNSEANAAANVAQKFQKQLFFEL

SEQ ID NO: 269 - protein, 767 aa, synthetic construct
  REGION 1..767: note = Description of Artificial Sequence: Synthetic polypeptide
MAQASSTPAVSPRPRPRYREERTLVRKLLPRPGQSKQEFRENVKKLRKAFLQFNADVSGVCQWAIQFRPRYGKPAEPTETFWKFFLEPETSLPPNDSRSPEFRRLQAFEAAAGINGAAALDDPAFTNELRDSILAVASRPKTKEAQRLFSRLKDYQPAHRMILAKVAAEWIESRYRRAHQNWERNYEEWKKEKQEWEQNHPELTPEIREAFNQIFQQLEVKEKRVRICPAARLLQNKDNCQYAGKNKHSVLCNQFNEFKKNHLQGKAIKFFYKDAEKYLRCGLQSLKPNVQGPFREDWNKYLRYMNLKEETLRGKNGGRLPHCKNLGQECEFNPHTALCKQYQQQLSSRPDLVQHDELYRKWRREYWREPRKPVFRYPSVKRHSIAKIFGENYFQADFKNSVVGLRLDSMPAGQYLEFAFAPWPRNYRPQPGETEISSVHLHFVGTRPRIGFRFRVPHKRSRFDCTQEELDELRSRTFPRKAQDQKFLEAARKRLLETFPGNAEQELRLLAVDLGTDSARAAFFIGKTFQQAFPLKIVKIEKLYEQWPNQKQAGDRRDASSKQPRPGLSRDHVGRHLQKMRAQASEIAQKRQELTGTPAPETTTDQAAKKATLQPFDLRGLTVHTARMIRDWARLNARQIIQLAEENQVDLIVLESLRGFRPPGYENLDQEKKRRVAFFAHGRIRRKVTEKAVERGMRVVTVPYLASSKVCAECRKKQKDNKQWEKNKKRGLFKCEGCGSQAQVDENAARVLGRVFWGEIELPTAIP

SEQ ID NO: 270 - protein, 870 aa, synthetic construct
  REGION 1..870: note = Description of Artificial Sequence: Synthetic polypeptide
MKVHEIPRSQLLKIKQYEGSFVEWYRDLQEDRKKFASLLFRWAAFGYAAREDDGATYISPSQALLERRLLLGDAEDVAIKFLDVLFKGGAPSSSCYSLFYEDFALRDKAKYSGAKREFIEGLATMPLDKIIERIRQDEQLSKIPAEEWLILGAEYSPEEIWEQVAPRIVNVDRSLGKQLRERLGIKCRRPHDAGYCKILMEVVARQLRSHNETYHEYLNQTHEMKTKVANNLTNEFDLVCEFAEVLEEKNYGLGWYVLWQGVKQALKEQKKPTKIQIAVDQLRQPKFAGLLTAKWRALKGAYDTWKLKKRLEKRKAFPYMPNWDNDYQIPVGLTGLGVFTLEVKRTEVVVDLKEHGKLFCSHSHYFGDLTAEKHPSRYHLKFRHKLKLRKRDSRVEPTIGPWIEAALREITIQKKPNGVFYLGLPYALSHGIDNFQIAKRFFSAAKPDKEVINGLPSEMVVGAADLNLSNIVAPVKARIGKGLEGPLHALDYGYGELIDGPKILTPDGPRCGELISLKRDIVEIKSAIKEFKACQREGLTMSEETTTWLSEVESPSDSPRCMIQSRIADTSRRLNSFKYQMNKEGYQDLAEALRLLDAMDSYNSLLESYQRMHLSPGEQSPKEAKFDTKRASFRDLLRRRVAHTIVEYFDDCDIVFFEDLDGPSDSDSRNNALVKLLSPRTLLLYIRQALEKRGIGMVEVAKDGTSQNNPISGHVGWRNKQNKSEIYFYEDKELLVMDADEVGAMNILCRGLNHSVCPYSFVTKAPEKKNDEKKEGDYGKRVKRFLKDRYGSSNVRFLVASMGFVTVTTKRPKDALVGKRLYYHGGELVTHDLHNRMKDEIKYLVEKEVLARRVSLSDSTIKSYKSFAHV

SEQ ID NO: 271 - protein, 1093 aa, synthetic construct
  REGION 1..1093: note = Description of Artificial Sequence: Synthetic polypeptide
MSNKEKNASETRKAYTTKMIPRSHDRMKLLGNFMDYLMDGTPIFFELWNQFGGGIDRDIISGTANKDKISDDLLLAVNWFKVMPINSKPQGVSPSNLANLFQQYSGSEPDIQAQEYFASNFDTEKHQWKDMRVEYERLLAELQLSRSDMHHDLKLMYKEKCIGLSLSTAHYITSVMFGTGAKNNRQTKHQFYSKVIQLLEESTQINSVEQLASIILKAGDCDSYRKLRIRCSRKGATPSILKIVQDYELGTNHDDEVNVPSLIANLKEKLGRFEYECEWKCMEKIKAFLASKVGPYYLGSYSAMLENALSPIKGMTTKNCKFVLKQIDAKNDIKYENEPFGKIVEGFFDSPYFESDTNVKWVLHPHHIGESNIKTLWEDLNAIHSKYEEDIASLSEDKKEKRIKVYQGDVCQTINTYCEEVGKEAKTPLVQLLRYLYSRKDDIAVDKIIDGITFLSKKHKVEKQKINPVIQKYPSFNFGNNSKLLGKIISPKDKLKHNLKCNRNQVDNYIWIEIKVLNTKTMRWEKHHYALSSTRFLEEVYYPATSENPPDALAARFRTKTNGYEGKPALSAEQIEQIRSAPVGLRKVKKRQMRLEAARQQNLLPRYTWGKDFNINICKRGNNFEVTLATKVKKKKEKNYKVVLGYDANIVRKNTYAAIEAHANGDGVIDYNDLPVKPIESGFVTVESQVRDKSYDQLSYNGVKLLYCKPHVESRRSFLEKYRNGTMKDNRGNNIQIDFMKDFEAIADDETSLYYFNMKYCKLLQSSIRNHSSQAKEYREEIFELLRDGKLSVLKLSSLSNLSFVMFKVAKSLIGTYFGHLLKKPKNSKSDVKAPPITDEDKQKADPEMFALRLALEEKRLNKVKSKKEVIANKIVAKALELRDKYGPVLIKGENISDTTKKGKKSSTNSFLMDWLARGVANKVKEMVMMHQGLEFVEVNPNFTSHQDPFVHKNPENTFRARYSRCTPSELTEKNRKEILSFLSDKPSKRPTNAYYNEGAMAFLATYGLKKNDVLGVSLEKFKQIMANILHQRSEDQLLFPSRGGMFYLATYKLDADATSVNWNGKQFWVCNADLVAAYNVGLVDIQKDFKKK

SEQ ID NO: 272 - protein, 1054 aa, synthetic construct
  REGION 1..1054: note = Description of Artificial Sequence: Synthetic polypeptide
MSSAIKSYKSVLRPNERKNQLLKSTIQCLEDGSAFFFKMLQGLFGGITPEIVRFSTEQEKQQQDIALWCAVNWFRPVSQDSLTHTIASDNLVEKFEEYYGGTASDAIKQYFSASIGESYYWNDCRQQYYDLCRELGVEVSDLTHDLEILCREKCLAVATESNQNNSIISVLFGTGEKEDRSVKLRITKKILEAISNLKEIPKNVAPIQEIILNVAKATKETFRQVYAGNLGAPSTLEKFIAKDGQKEFDLKKLQTDLKKVIRGKSKERDWCCQEELRSYVEQNTIQYDLWAWGEMFNKAHTALKIKSTRNYNFAKQRLEQFKEIQSLNNLLVVKKLNDFFDSEFFSGEETYTICVHHLGGKDLSKLYKAWEDDPADPENAIVVLCDDLKNNFKKEPIRNILRYIFTIRQECSAQDILAAAKYNQQLDRYKSQKANPSVLGNQGFTWTNAVILPEKAQRNDRPNSLDLRIWLYLKLRHPDGRWKKHHIPFYDTRFFQEIYAAGNSPVDTCQFRTPRFGYHLPKLTDQTAIRVNKKHVKAAKTEARIRLAIQQGTLPVSNLKITEISATINSKGQVRIPVKFDVGRQKGTLQIGDRFCGYDQNQTASHAYSLWEVVKEGQYHKELGCFVRFISSGDIVSITENRGNQFDQLSYEGLAYPQYADWRKKASKFVSLWQITKKNKKKEIVTVEAKEKFDAICKYQPRLYKFNKEYAYLLRDIVRGKSLVELQQIRQEIFRFIEQDCGVTRLGSLSLSTLETVKAVKGIIYSYFSTALNASKNNPISDEQRKEFDPELFALLEKLELIRTRKKKQKVERIANSLIQTCLENNIKFIRGEGDLSTTNNATKKKANSRSMDWLARGVFNKIRQLAPMHNITLFGCGSLYTSHQDPLVHRNPDKAMKCRWAAIPVKDIGDWVLRKLSQNLRAKNIGTGEYYHQGVKEFLSHYELQDLEEELLKWRSDRKSNIPCWVLQNRLAEKLGNKEAVVYIPVRGGRIYFATHKVATGAVSIVFDQKQVWVCNADHVAAANIALTVKGIGEQSSDEENPDGSRIKLQLTS

SEQ ID NO: 273 - protein, 6 aa, synthetic construct
  REGION 1..6: note = Description of Artificial Sequence: Synthetic peptide
GGSGGS

SEQ ID NO: 274 - DNA, 4092 bp, synthetic construct
  misc_feature 1..4092: note = Description of Artificial Sequence: Synthetic polynucleotide
  source 1..4092: mol_type = other DNA
gccaccatggccccaaagaagaagcggaaggtcggtatccacggagtcccagcagccgccaccagatccttcatcctgaagatcgagcccaacgaggaagtgaagaaaggcctctggaaaacccacgaggtgctgaaccacggaatcgcctactacatgaatatcctgaagctgatccggcaagaggccatctacgagcaccacgagcaggaccccaagaatcccaagaaggtgtccaaggccgagatccaggccgagctgtgggatttcgtgctgaagatgcagaagtgcaacagcttcacacacgaggtggacaaggacgaggtgttcaacatcctgagagagctgtacgaggaactggtgcccagcagcgtggaaaagaagggcgaagccaaccagctgagcaacaagtttctgtaccctctggtggaccccaacagccagtctggaaagggaacagccagcagcggcagaaagcccagatggtacaacctgaagattgccggcgatcccggaggctctggaggaagctccgaagtcgagttttcccatgagtactggatgagacacgcattgactctcgcaaagagggctcgagatgaacgcgaggtgcccgtgggggcagtactcgtgctcaacaatcgcgtaatcggcgaaggttggaatagggcaatcggactccacgaccccactgcacatgcggaaatcatggcccttcgacagggagggcttgtgatgcagaattatcgactttatgatgcgacgctgtacgtcacgtttgaaccttgcgtaatgtgcgcgggagctatgattcactcccgcattggacgagttgtattcggtgttcgcaacgccaagacgggtgccgcaggttcactgatggacgtgctgcatcatccaggcatgaaccaccgggtagaaatcacagaaggcatattggcggacgaatgtgcggcgctgttgtgtcgtttttttcgcatgcccaggcgggtctttaacgcccagaaaaaagcacaatcctctactgacggctcttctggatctgaaacacctggcacaagcgagagcgccacccctgagagctctggctcctgggaagaagagaagaagaagtgggaagaagataagaaaaaggacccgctggccaagatcctgggcaagctggctgagtacggactgatccctctgttcatcccctacaccgacagcaacgagcccatcgtgaaagaaatcaagtggatggaaaagtcccggaaccagagcgtgcggcggctggataaggacatgttcattcaggccctggaacggttcctgagctgggagagctggaacctgaaagtgaaagaggaatacgagaaggtcgagaaagagtacaagaccctggaagagaggatcaaagaggacatccaggctctgaaggctctggaacagtatgagaaagagcggcaagaacagctgctgcgggacaccctgaacaccaacgagtaccggctgagcaagagaggccttagaggctggcgggaaatcatccagaaatggctgaaaatggacgagaacgagccctccgagaagtacctggaagtgttcaaggactaccagcggaagcaccctagagaggccggcgattacagcgtgtacgagttcctgtccaagaaagagaaccacttcatctggcggaatcaccctgagtacccctacctgtacgccaccttctgcgagatcgacaagaaaaagaaggacgccaagcagcaggccaccttcacactggccgatcctatcaatcaccctctgtgggtccgattcgaggaaagaagcggcagcaacctgaacaagtacagaatcctgaccgagcagctgcacaccgagaagctgaagaaaaagctgacagtgcagctggaccggctgatctaccctacagaatctggcggctgggaagagaagggcaaagtggacattgtgctgctgcccagccggcagttctacaaccagatcttcctggacatcgaggaaaagggcaagcacgccttcacctacaaggatgagagcatcaagttccctctgaagggcacactcggcggagccagagtgcagttcgacagagatcacctgagaagataccctcacaaggtggaaagcggcaacgtgggcagaatctacttcaacatgaccgtgaacatcgagcctacagagtccccagtgtccaagtctctgaagatccaccgggacgacttccccaaggtggtcaacttcaagcccaaagaactgaccgagtggatcaaggacagcaagggcaagaaactgaagtccggcatcgagtccctggaaatcggcctgagagtgatgagcatcgacctgggacagagacaggccgctgccgcctctattttcgaggtggtggatcagaagcccgacatcgaaggcaagctgtttttcccaatcaagggcaccgagctgtatgccgtgcacagagccagcttcaacatcaagctgcccggcgagacactggtcaagagcagagaagtgctgcggaaggccagagaggacaatctgaaactgatgaaccagaagctcaacttcctgcggaacgtgctgcacttccagcagttcgaggacatcaccgagagagagaagcgggtcaccaagtggatcagcagacaagagaacagcgacgtgcccctggtgtaccaggatgagctgatccagatccgcgagctgatgtacaagccttacaaggactgggtcgccttcctgaagcagctccacaagagactggaagtcgagatcggcaaagaagtgaagcactggcggaagtccctgagcgacggaagaaagggcctgtacggcatctccctgaagaacatcgacgagatcgatcggacccggaagttcctgctgagatggtccctgaggcctaccgaacctggcgaagtgcgtagactggaacccggccagagattcgccatcgaccagctgaatcacctgaacgccctgaaagaagatcggctgaagaagatggccaacaccatcatcatgcacgccctgggctactgctacgacgtgcggaagaagaaatggcaggctaagaaccccgcctgccagatcatcctgttcgaggatctgagcaactacaacccctacgaggaaaggtcccgcttcgagaacagcaagctcatgaagtggtccagacgcgagatccccagacaggttgcactgcagggcgagatctatggcctgcaagtgggagaagtgggcgctcagttcagcagcagattccacgccaagacaggcagccctggcatcagatgtagcgtcgtgaccaaagagaagctgcaggacaatcggttcttcaagaatctgcagagagagggcagactgaccctggacaaaatcgccgtgctgaaagagggcgatctgtacccagacaaaggcggcgagaagttcatcagcctgagcaaggatcggaagtgcgtgaccacacacgccgacatcaacgccgctcagaacctgcagaagcggttctggacaagaacccacggcttctacaaggtgtactgcaaggcctaccaggtggacggccagaccgtgtacatccctgagagcaaggaccagaagcagaagatcatcgaagagttcggcgagggctacttcattctgaaggacggggtgtacgaatgggtcaacgccggcaagctgaaaatcaagaagggcagctccaagcagagcagcagcgagctggtggatagcgacatcctgaaagacagcttcgacctggcctccgagctgaaaggcgaaaagctgatgctgtacagggaccccagcggcaatgtgttccccagcgacaaatggatggccgctggcgtgttcttcggaaagctggaacgcatcctgatcagcaagctgaccaaccagtactccatcagcaccatcgaggacgacagcagcaagcagtctatgaaaaggccggcggccacgaaaaaggccggccaggcaaaaaagaaaaagggatcctacccatacgatgttccagattacgcttatccctacgacgtgcctgattatgcatacccatatgatgtccccgactatgcctaa

SEQ ID NO: 275 - protein, 1361 aa, synthetic construct
  REGION 1..1361: note = Description of Artificial Sequence: Synthetic polypeptide
MAPKKKRKVGIHGVPAAATRSFILKIEPNEEVKKGLWKTHEVLNHGIAYYMNILKLIRQEAIYEHHEQDPKNPKKVSKAEIQAELWDFVLKMQKCNSFTHEVDKDEVFNILRELYEELVPSSVEKKGEANQLSNKFLYPLVDPNSQSGKGTASSGRKPRWYNLKIAGDPGGSGGSSEVEFSHEYWMRHALTLAKRARDEREVPVGAVLVLNNRVIGEGWNRAIGLHDPTAHAEIMALRQGGLVMQNYRLYDATLYVTFEPCVMCAGAMIHSRIGRVVFGVRNAKTGAAGSLMDVLHHPGMNHRVEITEGILADECAALLCRFFRMPRRVFNAQKKAQSSTDGSSGSETPGTSESATPESSGSWEEEKKKWEEDKKKDPLAKILGKLAEYGLIPLFIPYTDSNEPIVKEIKWMEKSRNQSVRRLDKDMFIQALERFLSWESWNLKVKEEYEKVEKEYKTLEERIKEDIQALKALEQYEKERQEQLLRDTLNTNEYRLSKRGLRGWREIIQKWLKMDENEPSEKYLEVFKDYQRKHPREAGDYSVYEFLSKKENHFIWRNHPEYPYLYATFCEIDKKKKDAKQQATFTLADPINHPLWVRFEERSGSNLNKYRILTEQLHTEKLKKKLTVQLDRLIYPTESGGWEEKGKVDIVLLPSRQFYNQIFLDIEEKGKHAFTYKDESIKFPLKGTLGGARVQFDRDHLRRYPHKVESGNVGRIYFNMTVNIEPTESPVSKSLKIHRDDFPKVVNFKPKELTEWIKDSKGKKLKSGIESLEIGLRVMSIDLGQRQAAAASIFEVVDQKPDIEGKLFFPIKGTELYAVHRASFNIKLPGETLVKSREVLRKAREDNLKLMNQKLNFLRNVLHFQQFEDITEREKRVTKWISRQENSDVPLVYQDELIQIRELMYKPYKDWVAFLKQLHKRLEVEIGKEVKHWRKSLSDGRKGLYGISLKNIDEIDRTRKFLLRWSLRPTEPGEVRRLEPGQRFAIDQLNHLNALKEDRLKKMANTIIMHALGYCYDVRKKKWQAKNPACQIILFEDLSNYNPYEERSRFENSKLMKWSRREIPRQVALQGEIYGLQVGEVGAQFSSRFHAKTGSPGIRCSVVTKEKLQDNRFFKNLQREGRLTLDKIAVLKEGDLYPDKGGEKFISLSKDRKCVTTHADINAAQNLQKRFWTRTHGFYKVYCKAYQVDGQTVYIPESKDQKQKIIEEFGEGYFILKDGVYEWVNAGKLKIKKGSSKQSSSELVDSDILKDSFDLASELKGEKLMLYRDPSGNVFPSDKWMAAGVFFGKLERILISKLTNQYSISTIEDDSSKQSMKRPAATKKAGQAKKKKGSYPYDVPDYAYPYDVPDYAYPYDVPDYA

SEQ ID NO: 276 - DNA, 4092 bp, synthetic construct
  misc_feature 1..4092: note = Description of Artificial Sequence: Synthetic polynucleotide
  source 1..4092: mol_type = other DNA
gccaccatggccccaaagaagaagcggaaggtcggtatccacggagtcccagcagccgccaccagatccttcatcctgaagatcgagcccaacgaggaagtgaagaaaggcctctggaaaacccacgaggtgctgaaccacggaatcgcctactacatgaatatcctgaagctgatccggcaagaggccatctacgagcaccacgagcaggaccccaagaatcccaagaaggtgtccaaggccgagatccaggccgagctgtgggatttcgtgctgaagatgcagaagtgcaacagcttcacacacgaggtggacaaggacgaggtgttcaacatcctgagagagctgtacgaggaactggtgcccagcagcgtggaaaagaagggcgaagccaaccagctgagcaacaagtttctgtaccctctggtggaccccaacagccagtctggaaagggaacagccagcagcggcagaaagcccagatggtacaacctgaagattgccggcgatccctcctgggaagaagagaagaagaagtgggaagaagataagaaaaaggacccgctggccaagatcctgggcaagctggctgagtacggactgatccctctgttcatcccctacaccgacagcaacgagcccatcgtgaaagaaatcaagtggatggaaaagtcccggaaccagagcgtgcggcggctggataaggacatgttcattcaggccctggaacggttcctgagctgggagagctggaacctgaaagtgaaagaggaatacgagaaggtcgagaaagagtacaagaccctggaagagaggatcaaaggaggctctggaggaagctccgaagtcgagttttcccatgagtactggatgagacacgcattgactctcgcaaagagggctcgagatgaacgcgaggtgcccgtgggggcagtactcgtgctcaacaatcgcgtaatcggcgaaggttggaatagggcaatcggactccacgaccccactgcacatgcggaaatcatggcccttcgacagggagggcttgtgatgcagaattatcgactttatgatgcgacgctgtacgtcacgtttgaaccttgcgtaatgtgcgcgggagctatgattcactcccgcattggacgagttgtattcggtgttcgcaacgccaagacgggtgccgcaggttcactgatggacgtgctgcatcatccaggcatgaaccaccgggtagaaatcacagaaggcatattggcggacgaatgtgcggcgctgttgtgtcgtttttttcgcatgcccaggcgggtctttaacgcccagaaaaaagcacaatcctctactgacggctcttctggatctgaaacacctggcacaagcgagagcgccacccctgagagctctggcgaggacatccaggctctgaaggctctggaacagtatgagaaagagcggcaagaacagctgctgcgggacaccctgaacaccaacgagtaccggctgagcaagagaggccttagaggctggcgggaaatcatccagaaatggctgaaaatggacgagaacgagccctccgagaagtacctggaagtgttcaaggactaccagcggaagcaccctagagaggccggcgattacagcgtgtacgagttcctgtccaagaaagagaaccacttcatctggcggaatcaccctgagtacccctacctgtacgccaccttctgcgagatcgacaagaaaaagaaggacgccaagcagcaggccaccttcacactggccgatcctatcaatcaccctctgtgggtccgattcgaggaaagaagcggcagcaacctgaacaagtacagaatcctgaccgagcagctgcacaccgagaagctgaagaaaaagctgacagtgcagctggaccggctgatctaccctacagaatctggcggctgggaagagaagggcaaagtggacattgtgctgctgcccagccggcagttctacaaccagatcttcctggacatcgaggaaaagggcaagcacgccttcacctacaaggatgagagcatcaagttccctctgaagggcacactcggcggagccagagtgcagttcgacagagatcacctgagaagataccctcacaaggtggaaagcggcaacgtgggcagaatctacttcaacatgaccgtgaacatcgagcctacagagtccccagtgtccaagtctctgaagatccaccgggacgacttccccaaggtggtcaacttcaagcccaaagaactgaccgagtggatcaaggacagcaagggcaagaaactgaagtccggcatcgagtccctggaaatcggcctgagagtgatgagcatcgacctgggacagagacaggccgctgccgcctctattttcgaggtggtggatcagaagcccgacatcgaaggcaagctgtttttcccaatcaagggcaccgagctgtatgccgtgcacagagccagcttcaacatcaagctgcccggcgagacactggtcaagagcagagaagtgctgcggaaggccagagaggacaatctgaaactgatgaaccagaagctcaacttcctgcggaacgtgctgcacttccagcagttcgaggacatcaccgagagagagaagcgggtcaccaagtggatcagcagacaagagaacagcgacgtgcccctggtgtaccaggatgagctgatccagatccgcgagctgatgtacaagccttacaaggactgggtcgccttcctgaagcagctccacaagagactggaagtcgagatcggcaaagaagtgaagcactggcggaagtccctgagcgacggaagaaagggcctgtacggcatctccctgaagaacatcgacgagatcgatcggacccggaagttcctgctgagatggtccctgaggcctaccgaacctggcgaagtgcgtagactggaacccggccagagattcgccatcgaccagctgaatcacctgaacgccctgaaagaagatcggctgaagaagatggccaacaccatcatcatgcacgccctgggctactgctacgacgtgcggaagaagaaatggcaggctaagaaccccgcctgccagatcatcctgttcgaggatctgagcaactacaacccctacgaggaaaggtcccgcttcgagaacagcaagctcatgaagtggtccagacgcgagatccccagacaggttgcactgcagggcgagatctatggcctgcaagtgggagaagtgggcgctcagttcagcagcagattccacgccaagacaggcagccctggcatcagatgtagcgtcgtgaccaaagagaagctgcaggacaatcggttcttcaagaatctgcagagagagggcagactgaccctggacaaaatcgccgtgctgaaagagggcgatctgtacccagacaaaggcggcgagaagttcatcagcctgagcaaggatcggaagtgcgtgaccacacacgccgacatcaacgccgctcagaacctgcagaagcggttctggacaagaacccacggcttctacaaggtgtactgcaaggcctaccaggtggacggccagaccgtgtacatccctgagagcaaggaccagaagcagaagatcatcgaagagttcggcgagggctacttcattctgaaggacggggtgtacgaatgggtcaacgccggcaagctgaaaatcaagaagggcagctccaagcagagcagcagcgagctggtggatagcgacatcctgaaagacagcttcgacctggcctccgagctgaaaggcgaaaagctgatgctgtacagggaccccagcggcaatgtgttccccagcgacaaatggatggccgctggcgtgttcttcggaaagctggaacgcatcctgatcagcaagctgaccaaccagtactccatcagcaccatcgaggacgacagcagcaagcagtctatgaaaaggccggcggccacgaaaaaggccggccaggcaaaaaagaaaaagggatcctacccatacgatgttccagattacgcttatccctacgacgtgcctgattatgcatacccatatgatgtccccgactatgcctaa

SEQ ID NO: 277 - protein, 1361 aa, synthetic construct
  REGION 1..1361: note = Description of Artificial Sequence: Synthetic polypeptide
MAPKKKRKVGIHGVPAAATRSFILKIEPNEEVKKGLWKTHEVLNHGIAYYMNILKLIRQEAIYEHHEQDPKNPKKVSKAEIQAELWDFVLKMQKCNSFTHEVDKDEVFNILRELYEELVPSSVEKKGEANQLSNKFLYPLVDPNSQSGKGTASSGRKPRWYNLKIAGDPSWEEEKKKWEEDKKKDPLAKILGKLAEYGLIPLFIPYTDSNEPIVKEIKWMEKSRNQSVRRLDKDMFIQALERFLSWESWNLKVKEEYEKVEKEYKTLEERIKGGSGGSSEVEFSHEYWMRHALTLAKRARDEREVPVGAVLVLNNRVIGEGWNRAIGLHDPTAHAEIMALRQGGLVMQNYRLYDATLYVTFEPCVMCAGAMIHSRIGRVVFGVRNAKTGAAGSLMDVLHHPGMNHRVEITEGILADECAALLCRFFRMPRRVFNAQKKAQSSTDGSSGSETPGTSESATPESSGEDIQALKALEQYEKERQEQLLRDTLNTNEYRLSKRGLRGWREIIQKWLKMDENEPSEKYLEVFKDYQRKHPREAGDYSVYEFLSKKENHFIWRNHPEYPYLYATFCEIDKKKKDAKQQATFTLADPINHPLWVRFEERSGSNLNKYRILTEQLHTEKLKKKLTVQLDRLIYPTESGGWEEKGKVDIVLLPSRQFYNQIFLDIEEKGKHAFTYKDESIKFPLKGTLGGARVQFDRDHLRRYPHKVESGNVGRIYFNMTVNIEPTESPVSKSLKIHRDDFPKVVNFKPKELTEWIKDSKGKKLKSGIESLEIGLRVMSIDLGQRQAAAASIFEVVDQKPDIEGKLFFPIKGTELYAVHRASFNIKLPGETLVKSREVLRKAREDNLKLMNQKLNFLRNVLHFQQFEDITEREKRVTKWISRQENSDVPLVYQDELIQIRELMYKPYKDWVAFLKQLHKRLEVEIGKEVKHWRKSLSDGRKGLYGISLKNIDEIDRTRKFLLRWSLRPTEPGEVRRLEPGQRFAIDQLNHLNALKEDRLKKMANTIIMHALGYCYDVRKKKWQAKNPACQIILFEDLSNYNPYEERSRFENSKLMKWSRREIPRQVALQGEIYGLQVGEVGAQFSSRFHAKTGSPGIRCSVVTKEKLQDNRFFKNLQREGRLTLDKIAVLKEGDLYPDKGGEKFISLSKDRKCVTTHADINAAQNLQKRFWTRTHGFYKVYCKAYQVDGQTVYIPESKDQKQKIIEEFGEGYFILKDGVYEWVNAGKLKIKKGSSKQSSSELVDSDILKDSFDLASELKGEKLMLYRDPSGNVFPSDKWMAAGVFFGKLERILISKLTNQYSISTIEDDSSKQSMKRPAATKKAGQAKKKKGSYPYDVPDYAYPYDVPDYAYPYDVPDYA

SEQ ID NO: 278 - DNA, 4092 bp, synthetic construct
  misc_feature 1..4092: note = Description of Artificial Sequence: Synthetic polynucleotide
  source 1..4092: mol_type = other DNA
gccaccatggccccaaagaagaagcggaaggtcggtatccacggagtcccagcagccgccaccagatccttcatcctgaagatcgagcccaacgaggaagtgaagaaaggcctctggaaaacccacgaggtgctgaaccacggaatcgcctactacatgaatatcctgaagctgatccggcaagaggccatctacgagcaccacgagcaggaccccaagaatcccaagaaggtgtccaaggccgagatccaggccgagctgtgggatttcgtgctgaagatgcagaagtgcaacagcttcacacacgaggtggacaaggacgaggtgttcaacatcctgagagagctgtacgaggaactggtgcccagcagcgtggaaaagaagggcgaagccaaccagctgagcaacaagtttctgtaccctctggtggaccccaacagccagtctggaaagggaacagccagcagcggcagaaagcccagatggtacaacctgaagattgccggcgatccctcctgggaagaagagaagaagaagtgggaagaagataagaaaaaggacccgctggccaagatcctgggcaagctggctgagtacggactgatccctctgttcatcccctacaccgacagcaacgagcccatcgtgaaagaaatcaagtggatggaaaagtcccggaaccagagcgtgcggcggctggataaggacatgttcattcaggccctggaacggttcctgagctgggagagctggaacctgaaagtgaaagaggaatacgagaaggtcgagaaagagtacaagaccctggaagagaggatcaaagaggacatccaggctctgaaggctctggaacagtatgagaaagagcggcaagaacagctgctgcgggacaccctgaacaccaacgagtaccggctgagcaagagaggccttagaggctggcgggaaatcatccagaaatggctgaaaatggacggaggctctggaggaagctccgaagtcgagttttcccatgagtactggatgagacacgcattgactctcgcaaagagggctcgagatgaacgcgaggtgcccgtgggggcagtactcgtgctcaacaatcgcgtaatcggcgaaggttggaatagggcaatcggactccacgaccccactgcacatgcggaaatcatggcccttcgacagggagggcttgtgatgcagaattatcgactttatgatgcgacgctgtacgtcacgtttgaaccttgcgtaatgtgcgcgggagctatgattcactcccgcattggacgagttgtattcggtgttcgcaacgccaagacgggtgccgcaggttcactgatggacgtgctgcatcatccaggcatgaaccaccgggtagaaatcacagaaggcatattggcggacgaatgtgcggcgctgttgtgtcgtttttttcgcatgcccaggcgggtctttaacgcccagaaaaaagcacaatcctctactgacggctcttctggatctgaaacacctggcacaagcgagagcgccacccctgagagctctggcgagaacgagccctccgagaagtacctggaagtgttcaaggactaccagcggaagcaccctagagaggccggcgattacagcgtgtacgagttcctgtccaagaaagagaaccacttcatctggcggaatcaccctgagtacccctacctgtacgccaccttctgcgagatcgacaagaaaaagaaggacgccaagcagcaggccaccttcacactggccgatcctatcaatcaccctctgtgggtccgattcgaggaaagaagcggcagcaacctgaacaagtacagaatcctgaccgagcagctgcacaccgagaagctgaagaaaaagctgacagtgcagctggaccggctgatctaccctacagaatctggcggctgggaagagaagggcaaagtggacattgtgctgctgcccagccggcagttctacaaccagatcttcctggacatcgaggaaaagggcaagcacgccttcacctacaaggatgagagcatcaagttccctctgaagggcacactcggcggagccagagtgcagttcgacagagatcacctgagaagataccctcacaaggtggaaagcggcaacgtgggcagaatctacttcaacatgaccgtgaacatcgagcctacagagtccccagtgtccaagtctctgaagatccaccgggacgacttccccaaggtggtcaacttcaagcccaaagaactgaccgagtggatcaaggacagcaagggcaagaaactgaagtccggcatcgagtccctggaaatcggcctgagagtgatgagcatcgacctgggacagagacaggccgctgccgcctctattttcgaggtggtggatcagaagcccgacatcgaaggcaagctgtttttcccaatcaagggcaccgagctgtatgccgtgcacagagccagcttcaacatcaagctgcccggcgagacactggtcaagagcagagaagtgctgcggaaggccagagaggacaatctgaaactgatgaaccagaagctcaacttcctgcggaacgtgctgcacttccagcagttcgaggacatcaccgagagagagaagcgggtcaccaagtggatcagcagacaagagaacagcgacgtgcccctggtgtaccaggatgagctgatccagatccgcgagctgatgtacaagccttacaaggactgggtcgccttcctgaagcagctccacaagagactggaagtcgagatcggcaaagaagtgaagcactggcggaagtccctgagcgacggaagaaagggcctgtacggcatctccctgaagaacatcgacgagatcgatcggacccggaagttcctgctgagatggtccctgaggcctaccgaacctggcgaagtgcgtagactggaacccggccagagattcgccatcgaccagctgaatcacctgaacgccctgaaagaagatcggctgaagaagatggccaacaccatcatcatgcacgccctgggctactgctacgacgtgcggaagaagaaatggcaggctaagaaccccgcctgccagatcatcctgttcgaggatctgagcaactacaacccctacgaggaaaggtcccgcttcgagaacagcaagctcatgaagtggtccagacgcgagatccccagacaggttgcactgcagggcgagatctatggcctgcaagtgggagaagtgggcgctcagttcagcagcagattccacgccaagacaggcagccctggcatcagatgtagcgtcgtgaccaaagagaagctgcaggacaatcggttcttcaagaatctgcagagagagggcagactgaccctggacaaaatcgccgtgctgaaagagggcgatctgtacccagacaaaggcggcgagaagttcatcagcctgagcaaggatcggaagtgcgtgaccacacacgccgacatcaacgccgctcagaacctgcagaagcggttctggacaagaacccacggcttctacaaggtgtactgcaaggcctaccaggtggacggccagaccgtgtacatccctgagagcaaggaccagaagcagaagatcatcgaagagttcggcgagggctacttcattctgaaggacggggtgtacgaatgggtcaacgccggcaagctgaaaatcaagaagggcagctccaagcagagcagcagcgagctggtggatagcgacatcctgaaagacagcttcgacctggcctccgagctgaaaggcgaaaagctgatgctgtacagggaccccagcggcaatgtgttccccagcgacaaatggatggccgctggcgtgttcttcggaaagctggaacgcatcctgatcagcaagctgaccaaccagtactccatcagcaccatcgaggacgacagcagcaagcagtctatgaaaaggccggcggccacgaaaaaggccggccaggcaaaaaagaaaaagggatcctacccatacgatgttccagattacgcttatccctacgacgtgcctgattatgcatacccatatgatgtccccgactatgcctaa

SEQ ID NO: 279 - protein, 1361 aa, synthetic construct
  REGION 1..1361: note = Description of Artificial Sequence: Synthetic polypeptide
MAPKKKRKVGIHGVPAAATRSFILKIEPNEEVKKGLWKTHEVLNHGIAYYMNILKLIRQEAIYEHHEQDPKNPKKVSKAEIQAELWDFVLKMQKCNSFTHEVDKDEVFNILRELYEELVPSSVEKKGEANQLSNKFLYPLVDPNSQSGKGTASSGRKPRWYNLKIAGDPSWEEEKKKWEEDKKKDPLAKILGKLAEYGLIPLFIPYTDSNEPIVKEIKWMEKSRNQSVRRLDKDMFIQALERFLSWESWNLKVKEEYEKVEKEYKTLEERIKEDIQALKALEQYEKERQEQLLRDTLNTNEYRLSKRGLRGWREIIQKWLKMDGGSGGSSEVEFSHEYWMRHALTLAKRARDEREVPVGAVLVLNNRVIGEGWNRAIGLHDPTAHAEIMALRQGGLVMQNYRLYDATLYVTFEPCVMCAGAMIHSRIGRVVFGVRNAKTGAAGSLMDVLHHPGMNHRVEITEGILADECAALLCRFFRMPRRVFNAQKKAQSSTDGSSGSETPGTSESATPESSGENEPSEKYLEVFKDYQRKHPREAGDYSVYEFLSKKENHFIWRNHPEYPYLYATFCEIDKKKKDAKQQATFTLADPINHPLWVRFEERSGSNLNKYRILTEQLHTEKLKKKLTVQLDRLIYPTESGGWEEKGKVDIVLLPSRQFYNQIFLDIEEKGKHAFTYKDESIKFPLKGTLGGARVQFDRDHLRRYPHKVESGNVGRIYFNMTVNIEPTESPVSKSLKIHRDDFPKVVNFKPKELTEWIKDSKGKKLKSGIESLEIGLRVMSIDLGQRQAAAASIFEVVDQKPDIEGKLFFPIKGTELYAVHRASFNIKLPGETLVKSREVLRKAREDNLKLMNQKLNFLRNVLHFQQFEDITEREKRVTKWISRQENSDVPLVYQDELIQIRELMYKPYKDWVAFLKQLHKRLEVEIGKEVKHWRKSLSDGRKGLYGISLKNIDEIDRTRKFLLRWSLRPTEPGEVRRLEPGQRFAIDQLNHLNALKEDRLKKMANTIIMHALGYCYDVRKKKWQAKNPACQIILFEDLSNYNPYEERSRFENSKLMKWSRREIPRQVALQGEIYGLQVGEVGAQFSSRFHAKTGSPGIRCSVVTKEKLQDNRFFKNLQREGRLTLDKIAVLKEGDLYPDKGGEKFISLSKDRKCVTTHADINAAQNLQKRFWTRTHGFYKVYCKAYQVDGQTVYIPESKDQKQKIIEEFGEGYFILKDGVYEWVNAGKLKIKKGSSKQSSSELVDSDILKDSFDLASELKGEKLMLYRDPSGNVFPSDKWMAAGVFFGKLERILISKLTNQYSISTIEDDSSKQSMKRPAATKKAGQAKKKKGSYPYDVPDYAYPYDVPDYAYPYDVPDYA

SEQ ID NO: 280 - DNA, 4092 bp, synthetic construct
  misc_feature 1..4092: note = Description of Artificial Sequence: Synthetic polynucleotide
  source 1..4092: mol_type = other DNA
gccaccatggccccaaagaagaagcggaaggtcggtatccacggagtcccagcagccgccaccagatccttcatcctgaagatcgagcccaacgaggaagtgaagaaaggcctctggaaaacccacgaggtgctgaaccacggaatcgcctactacatgaatatcctgaagctgatccggcaagaggccatctacgagcaccacgagcaggaccccaagaatcccaagaaggtgtccaaggccgagatccaggccgagctgtgggatttcgtgctgaagatgcagaagtgcaacagcttcacacacgaggtggacaaggacgaggtgttcaacatcctgagagagctgtacgaggaactggtgcccagcagcgtggaaaagaagggcgaagccaaccagctgagcaacaagtttctgtaccctctggtggaccccaacagccagtctggaaagggaacagccagcagcggcagaaagcccagatggtacaacctgaagattgccggcgatccctcctgggaagaagagaagaagaagtgggaagaagataagaaaaaggacccgctggccaagatcctgggcaagctggctgagtacggactgatccctctgttcatcccctacaccgacagcaacgagcccatcgtgaaagaaatcaagtggatggaaaagtcccggaaccagagcgtgcggcggctggataaggacatgttcattcaggccctggaacggttcctgagctgggagagctggaacctgaaagtgaaagaggaatacgagaaggtcgagaaagagtacaagaccctggaagagaggatcaaagaggacatccaggctctgaaggctctggaacagtatgagaaagagcggcaagaacagctgctgcgggacaccctgaacaccaacgagtaccggctgagcaagagaggccttagaggctggcgggaaatcatccagaaatggctgaaaatggacgagaacgagccctccgagaagtacctggaagtgttcaaggactaccagcggaagcaccctagagaggccggcgattacagcgtgtacgagttcctgtccaagaaagagaaccacttcatctggcggaatcaccctgagtacccctacctgtacgccaccttctgcgagatcgacaagaaaaagaaggacgccaagcagcaggccaccttcacactggccgatcctatcaatcaccctctgtgggtccgattcgaggaaagaagcggcagcaacctgaacaagtacagaatcctgaccgagcagctgcacaccgagaagctgaagaaaaagctgacagtgcagctggaccggctgatctaccctacagaatctggcggctgggaagagaagggcaaagtggacattgtgctgctgcccagccggcagttctacaaccagatcttcctggacatcgaggaaaagggcaagcacgccttcacctacaaggatgagagcatcaagttccctctgaagggcacactcggcggagccagagtgcagttcgacagagatcacctgagaagataccctcacaaggtggaaagcggcaacgtgggcagaatctacttcaacatgaccgtgaacatcgagcctacagagtccccagtgtccaagtctctgaagatccaccgggacgacttccccaaggtggtcaacttcaagcccaaagaactgaccgagtggatcaaggacagcaagggcaagaaactgaagtccggcatcgagtccctggaaatcggcctgagagtgatgagcatcgacctgggacagagacaggccgctgccgcctctattttcgaggtggtggatcagaagcccgacatcgaaggcaagctgtttttcccaatcaagggcaccgagctgtatgccgtgcacagagccagcttcaacatcaagctgcccggcgagacactggtcaagagcagagaagtgctgcggaaggccagagaggacaatctgaaactgatgaaccagaagctcaacttcctgcggaacgtgctgcacttccagcagttcgaggacatcaccgagagagagaagcgggtcaccaagtggatcagcagacaagagaacagcgacgtgcccctggtgtaccaggatgagctgatccagatccgcgagctgatgtacaagccttacaaggactgggtcgccttcctgaagcagctccacaagagactggaagtcgagatcggcaaagaagtgaagcactggcggaagtccctgagcgacggaagaaagggcctgtacggcatctccctgaagaacatcgacgagatcgatcggacccggaagttcctgctgagatggtccctgaggcctaccgaacctggcgaagtgcgtagactggaacccggccagagattcgccatcgaccagctgaatcacctgaacgccctgaaagaagatcggctgaagaagatggccaacaccatcatcatgcacgccctgggctactgctacgacgtgcggaagaagaaatggcaggctaagaaccccgcctgccagatcatcctgttcgaggatctgagcaactacaacccctacgaggaaaggtcccgcttcgagaacagcaagctcatgaagtggtccagacgcgagatccccagacaggttgcactgcagggcgagatctatggcctgcaagtgggagaagtgggcgctcagttcagcagcagattccacgccaagacaggcagccctggcatcagatgtagcgtcgtgaccaaagagaagctgcaggacaatcggttcttcaagaatctgcagagagagggcagactgaccctggacaaaatcgccgtgctgaaagagggcgatctgtacccagacaaaggcggcgagaagttcatcagcctgagcaaggatcggaagtgcgtgaccacacacgccgacatcaacgccgctcagaacctgcagaagcggttctggacaagaacccacggcttctacaaggtgtactgcaaggcctaccaggtggacggaggctctggaggaagctccgaagtcgagttttcccatgagtactggatgagacacgcattgactctcgcaaagagggctcgagatgaacgcgaggtgcccgtgggggcagtactcgtgctcaacaatcgcgtaatcggcgaaggttggaatagggcaatcggactccacgaccccactgcacatgcggaaatcatggcccttcgacagggagggcttgtgatgcagaattatcgactttatgatgcgacgctgtacgtcacgtttgaaccttgcgtaatgtgcgcgggagctatgattcactcccgcattggacgagttgtattcggtgttcgcaacgccaagacgggtgccgcaggttcactgatggacgtgctgcatcatccaggcatgaaccaccgggtagaaatcacagaaggcatattggcggacgaatgtgcggcgctgttgtgtcgtttttttcgcatgcccaggcgggtctttaacgcccagaaaaaagcacaatcctctactgacggctcttctggatctgaaacacctggcacaagcgagagcgccacccctgagagctctggcggccagaccgtgtacatccctgagagcaaggaccagaagcagaagatcatcgaagagttcggcgagggctacttcattctgaaggacggggtgtacgaatgggtcaacgccggcaagctgaaaatcaagaagggcagctccaagcagagcagcagcgagctggtggatagcgacatcctgaaagacagcttcgacctggcctccgagctgaaaggcgaaaagctgatgctgtacagggaccccagcggcaatgtgttccccagcgacaaatggatggccgctggcgtgttcttcggaaagctggaacgcatcctgatcagcaagctgaccaaccagtactccatcagcaccatcgaggacgacagcagcaagcagtctatgaaaaggccggcggccacgaaaaaggccggccaggcaaaaaagaaaaagggatcctacccatacgatgttccagattacgcttatccctacgacgtgcctgattatgcatacccatatgatgtccccgactatgcctaa

SEQ ID NO: 281 - protein, 1361 aa, synthetic construct
  REGION 1..1361: note = Description of Artificial Sequence: Synthetic polypeptide
MAPKKKRKVGIHGVPAAATRSFILKIEPNEEVKKGLWKTHEVLNHGIAYYMNILKLIRQEAIYEHHEQDPKNPKKVSKAEIQAELWDFVLKMQKCNSFTHEVDKDEVFNILRELYEELVPSSVEKKGEANQLSNKFLYPLVDPNSQSGKGTASSGRKPRWYNLKIAGDPSWEEEKKKWEEDKKKDPLAKILGKLAEYGLIPLFIPYTDSNEPIVKEIKWMEKSRNQSVRRLDKDMFIQALERFLSWESWNLKVKEEYEKVEKEYKTLEERIKEDIQALKALEQYEKERQEQLLRDTLNTNEYRLSKRGLRGWREIIQKWLKMDENEPSEKYLEVFKDYQRKHPREAGDYSVYEFLSKKENHFIWRNHPEYPYLYATFCEIDKKKKDAKQQATFTLADPINHPLWVRFEERSGSNLNKYRILTEQLHTEKLKKKLTVQLDRLIYPTESGGWEEKGKVDIVLLPSRQFYNQIFLDIEEKGKHAFTYKDESIKFPLKGTLGGARVQFDRDHLRRYPHKVESGNVGRIYFNMTVNIEPTESPVSKSLKIHRDDFPKVVNFKPKELTEWIKDSKGKKLKSGIESLEIGLRVMSIDLGQRQAAAASIFEVVDQKPDIEGKLFFPIKGTELYAVHRASFNIKLPGETLVKSREVLRKAREDNLKLMNQKLNFLRNVLHFQQFEDITEREKRVTKWISRQENSDVPLVYQDELIQIRELMYKPYKDWVAFLKQLHKRLEVEIGKEVKHWRKSLSDGRKGLYGISLKNIDEIDRTRKFLLRWSLRPTEPGEVRRLEPGQRFAIDQLNHLNALKEDRLKKMANTIIMHALGYCYDVRKKKWQAKNPACQIILFEDLSNYNPYEERSRFENSKLMKWSRREIPRQVALQGEIYGLQVGEVGAQFSSRFHAKTGSPGIRCSVVTKEKLQDNRFFKNLQREGRLTLDKIAVLKEGDLYPDKGGEKFISLSKDRKCVTTHADINAAQNLQKRFWTRTHGFYKVYCKAYQVDGGSGGSSEVEFSHEYWMRHALTLAKRARDEREVPVGAVLVLNNRVIGEGWNRAIGLHDPTAHAEIMALRQGGLVMQNYRLYDATLYVTFEPCVMCAGAMIHSRIGRVVFGVRNAKTGAAGSLMDVLHHPGMNHRVEITEGILADECAALLCRFFRMPRRVFNAQKKAQSSTDGSSGSETPGTSESATPESSGGQTVYIPESKDQKQKIIEEFGEGYFILKDGVYEWVNAGKLKIKKGSSKQSSSELVDSDILKDSFDLASELKGEKLMLYRDPSGNVFPSDKWMAAGVFFGKLERILISKLTNQYSISTIEDDSSKQSMKRPAATKKAGQAKKKKGSYPYDVPDYAYPYDVPDYAYPYDVPDYA

SEQ ID NO: 282 - DNA, 4092 bp, synthetic construct
  misc_feature 1..4092: note = Description of Artificial Sequence: Synthetic polynucleotide
  source 1..4092: mol_type = other DNA
gccaccatggccccaaagaagaagcggaaggtcggtatccacggagtcccagcagccgccaccagatccttcatcctgaagatcgagcccaacgaggaagtgaagaaaggcctctggaaaacccacgaggtgctgaaccacggaatcgcctactacatgaatatcctgaagctgatccggcaagaggccatctacgagcaccacgagcaggaccccaagaatcccaagaaggtgtccaaggccgagatccaggccgagctgtgggatttcgtgctgaagatgcagaagtgcaacagcttcacacacgaggtggacaaggacgaggtgttcaacatcctgagagagctgtacgaggaactggtgcccagcagcgtggaaaagaagggcgaagccaaccagctgagcaacaagtttctgtaccctctggtggaccccaacagccagtctggaaagggaacagccagcagcggcagaaagcccagatggtacaacctgaagattgccggcgatccctcctgggaagaagagaagaagaagtgggaagaagataagaaaaaggacccgctggccaagatcctgggcaagctggctgagtacggactgatccctctgttcatcccctacaccgacagcaacgagcccatcgtgaaagaaatcaagtggatggaaaagtcccggaaccagagcgtgcggcggctggataaggacatgttcattcaggccctggaacggttcctgagctgggagagctggaacctgaaagtgaaagaggaatacgagaaggtcgagaaagagtacaagaccctggaagagaggatcaaagaggacatccaggctctgaaggctctggaacagtatgagaaagagcggcaagaacagctgctgcgggacaccctgaacaccaacgagtaccggctgagcaagagaggccttagaggctggcgggaaatcatccagaaatggctgaaaatggacgagaacgagccctccgagaagtacctggaagtgttcaaggactaccagcggaagcaccctagagaggccggcgattacagcgtgtacgagttcctgtccaagaaagagaaccacttcatctggcggaatcaccctgagtacccctacctgtacgccaccttctgcgagatcgacaagaaaaagaaggacgccaagcagcaggccaccttcacactggccgatcctatcaatcaccctctgtgggtccgattcgaggaaagaagcggcagcaacctgaacaagtacagaatcctgaccgagcagctgcacaccgagaagctgaagaaaaagctgacagtgcagctggaccggctgatctaccctacagaatctggcggctgggaagagaagggcaaagtggacattgtgctgctgcccagccggcagttctacaaccagatcttcctggacatcgaggaaaagggcaagcacgccttcacctacaaggatgagagcatcaagttccctctgaagggcacactcggcggagccagagtgcagttcgacagagatcacctgagaagataccctcacaaggtggaaagcggcaacgtgggcagaatctacttcaacatgaccgtgaacatcgagcctacagagtccccagtgtccaagtctctgaagatccaccgggacgacttccccaaggtggtcaacttcaagcccaaagaactgaccgagtggatcaaggacagcaagggcaagaaactgaagtccggcatcgagtccctggaaatcggcctgagagtgatgagcatcgacctgggacagagacaggccgctgccgcctctattttcgaggtggtggatcagaagcccgacatcgaaggcaagctgtttttcccaatcaagggcaccgagctgtatgccgtgcacagagccagcttcaacatcaagctgcccggcgagacactggtcaagagcagagaagtgctgcggaaggccagagaggacaatctgaaactgatgaaccagaagctcaacttcctgcggaacgtgctgcacttccagcagttcgaggacatcaccgagagagagaagcgggtcaccaagtggatcagcagacaagagaacagcgacgtgcccctggtgtaccaggatgagctgatccagatccgcgagctgatgtacaagccttacaaggactgggtcgccttcctgaagcagctccacaagagactggaagtcgagatcggcaaagaagtgaagcactggcggaagtccctgagcgacggaagaaagggcctgtacggcatctccctgaagaacatcgacgagatcgatcggacccggaagttcctgctgagatggtccctgaggcctaccgaacctggcgaagtgcgtagactggaacccggccagagattcgccatcgaccagctgaatcacctgaacgccctgaaagaagatcggctgaagaagatggccaacaccatcatcatgcacgccctgggctactgctacgacgtgcggaagaagaaatggcaggctaagaaccccgcctgccagatcatcctgttcgaggatctgagcaactacaacccctacgaggaaaggtcccgcttcgagaacagcaagctcatgaagtggtccagacgcgagatccccagacaggttgcactgcagggcgagatctatggcctgcaagtgggagaagtgggcgctcagttcagcagcagattccacgccaagacaggcagccctggcatcagatgtagcgtcgtgaccaaagagaagctgcaggacaatcggttcttcaagaatctgcagagagagggcagactgaccctggacaaaatcgccgtgctgaaagagggcgatctgtacccagacaaaggcggcgagaagttcatcagcctgagcaaggatcggaagtgcgtgaccacacacgccgacatcaacgccgctcagaacctgcagaagcggttctggacaagaacccacggcttctacaaggtgtactgcaaggcctaccaggtggacggccagaccgtgtacatccctgagagcaaggaccagaagcagaagatcatcgaagagttcggcgagggctacttcattctgaaggacggggtgtacgaatgggtcaacgccggcaagggaggctctggaggaagctccgaagtcgagttttcccatgagtactggatgagacacgcattgactctcgcaaagagggctcgagatgaacgcgaggtgcccgtgggggcagtactcgtgctcaacaatcgcgtaatcggcgaaggttggaatagggcaatcggactccacgaccccactgcacatgcggaaatcatggcccttcgacagggagggcttgtgatgcagaattatcgactttatgatgcgacgctgtacgtcacgtttgaaccttgcgtaatgtgcgcgggagctatgattcactcccgcattggacgagttgtattcggtgttcgcaacgccaagacgggtgccgcaggttcactgatggacgtgctgcatcatccaggcatgaaccaccgggtagaaatcacagaaggcatattggcggacgaatgtgcggcgctgttgtgtcgtttttttcgcatgcccaggcgggtctttaacgcccagaaaaaagcacaatcctctactgacggctcttctggatctgaaacacctggcacaagcgagagcgccacccctgagagctctggcctgaaaatcaagaagggcagctccaagcagagcagcagcgagctggtggatagcgacatcctgaaagacagcttcgacctggcctccgagctgaaaggcgaaaagctgatgctgtacagggaccccagcggcaatgtgttccccagcgacaaatggatggccgctggcgtgttcttcggaaagctggaacgcatcctgatcagcaagctgaccaaccagtactccatcagcaccatcgaggacgacagcagcaagcagtctatgaaaaggccggcggccacgaaaaaggccggccaggcaaaaaagaaaaagggatcctacccatacgatgttccagattacgcttatccctacgacgtgcctgattatgcatacccatatgatgtccccgactatgcctaa

SEQ ID NO: 283 - protein, 1361 aa, synthetic construct
  REGION 1..1361: note = Description of Artificial Sequence: Synthetic polypeptide
MAPKKKRKVGIHGVPAAATRSFILKIEPNEEVKKGLWKTHEVLNHGIAYYMNILKLIRQEAIYEHHEQDPKNPKKVSKAEIQAELWDFVLKMQKCNSFTHEVDKDEVFNILRELYEELVPSSVEKKGEANQLSNKFLYPLVDPNSQSGKGTASSGRKPRWYNLKIAGDPSWEEEKKKWEEDKKKDPLAKILGKLAEYGLIPLFIPYTDSNEPIVKEIKWMEKSRNQSVRRLDKDMFIQALERFLSWESWNLKVKEEYEKVEKEYKTLEERIKEDIQALKALEQYEKERQEQLLRDTLNTNEYRLSKRGLRGWREIIQKWLKMDENEPSEKYLEVFKDYQRKHPREAGDYSVYEFLSKKENHFIWRNHPEYPYLYATFCEIDKKKKDAKQQATFTLADPINHPLWVRFEERSGSNLNKYRILTEQLHTEKLKKKLTVQLDRLIYPTESGGWEEKGKVDIVLLPSRQFYNQIFLDIEEKGKHAFTYKDESIKFPLKGTLGGARVQFDRDHLRRYPHKVESGNVGRIYFNMTVNIEPTESPVSKSLKIHRDDFPKVVNFKPKELTEWIKDSKGKKLKSGIESLEIGLRVMSIDLGQRQAAAASIFEVVDQKPDIEGKLFFPIKGTELYAVHRASFNIKLPGETLVKSREVLRKAREDNLKLMNQKLNFLRNVLHFQQFEDITEREKRVTKWISRQENSDVPLVYQDELIQIRELMYKPYKDWVAFLKQLHKRLEVEIGKEVKHWRKSLSDGRKGLYGISLKNIDEIDRTRKFLLRWSLRPTEPGEVRRLEPGQRFAIDQLNHLNALKEDRLKKMANTIIMHALGYCYDVRKKKWQAKNPACQIILFEDLSNYNPYEERSRFENSKLMKWSRREIPRQVALQGEIYGLQVGEVGAQFSSRFHAKTGSPGIRCSVVTKEKLQDNRFFKNLQREGRLTLDKIAVLKEGDLYPDKGGEKFISLSKDRKCVTTHADINAAQNLQKRFWTRTHGFYKVYCKAYQVDGQTVYIPESKDQKQKIIEEFGEGYFILKDGVYEWVNAGKGGSGGSSEVEFSHEYWMRHALTLAKRARDEREVPVGAVLVLNNRVIGEGWNRAIGLHDPTAHAEIMALRQGGLVMQNYRLYDATLYVTFEPCVMCAGAMIHSRIGRVVFGVRNAKTGAAGSLMDVLHHPGMNHRVEITEGILADECAALLCRFFRMPRRVFNAQKKAQSSTDGSSGSETPGTSESATPESSGLKIKKGSSKQSSSELVDSDILKDSFDLASELKGEKLMLYRDPSGNVFPSDKWMAAGVFFGKLERILISKLTNQYSISTIEDDSSKQSMKRPAATKKAGQAKKKKGSYPYDVPDYAYPYDVPDYAYPYDVPDYA

SEQ ID NO: 284 - skipped

SEQ ID NO: 285 - protein, 707 aa, synthetic construct
  REGION 1..707: note = Description of Artificial Sequence: Synthetic polypeptide
MADTPTLFTQFLRHHLPGQRFRKDILKQAGRILANKGEDATIAFLRGKSEESPPDFQPPVKCPIIACSRPLTEWPIYQASVAIQGYVYGQSLAEFEASDPGCSKDGLLGWFDKTGVCTDYFSVQGLNLIFQNARKRYIGVQTKVTNRNEKRHKKLKRINAKRIAEGLPELTSDEPESALDETGHLIDPPGLNTNIYCYQQVSPKPLALSEVNQLPTAYAGYSTSGDDPIQPMVTKDRLSISKGQPGYIPEHQRALLSQKKHRRMRGYGLKARALLVIVRIQDDWAVIDLRSLLRNAYWRRIVQTKEPSTITKLLKLVTGDPVLDATRMVATFTYKPGIVQVRSAKCLKNKQGSKLFSERYLNETVSVTSIDLGSNNLVAVATYRLVNGNTPELLQRFTLPSHLVKDFERYKQAHDTLEDSIQKTAVASLPQGQQTEIRMWSMYGFREAQERVCQELGLADGSIPWNVMTATSTILTDLFLARGGDPKKCMFTSEPKKKKNSKQVLYKIRDRAWAKMYRTLLSKETREAWNKALWGLKRGSPDYARLSKRKEELARRCVNYTISTAEKRAQCGRTIVALEDLNIGFFHGRGKQEPGWVGLFTRKKENRWLMQALHKAFLELAHHRGYHVIEVNPAYTSQTCPVCRHCDPDNRDQHNREAFHCIGCGFRGNADLDVATHNIAMVAITGESLKRARGSVASKTPQPLAAE

SEQ ID NO: 286 - protein, 757 aa, synthetic construct
  REGION 1..757: note = Description of Artificial Sequence: Synthetic polypeptide
MPKPAVESEFSKVLKKHFPGERFRSSYMKRGGKILAAQGEEAVVAYLQGKSEEEPPNFQPPAKCHVVTKSRDFAEWPIMKASEAIQRYIYALSTTERAACKPGKSSESHAAWFAATGVSNHGYSHVQGLNLIFDHTLGRYDGVLKKVQLRNEKARARLESINASRADEGLPEIKAEEEEVATNETGHLLQPPGINPSFYVYQTISPQAYRPRDEIVLPPEYAGYVRDPNAPIPLGVVRNRCDIQKGCPGYIPEWQREAGTAISPKTGKAVTVPGLSPKKNKRMRRYWRSEKEKAQDALLVTVRIGTDWVVIDVRGLLRNARWRTIAPKDISLNALLDLFTGDPVIDVRRNIVTFTYTLDACGTYARKWTLKGKQTKATLDKLTATQTVALVAIDLGQTNPISAGISRVTQENGALQCEPLDRFTLPDDLLKDISAYRIAWDRNEEELRARSVEALPEAQQAEVRALDGVSKETARTQLCADFGLDPKRLPWDKMSSNTTFISEALLSNSVSRDQVFFTPAPKKGAKKKAPVEVMRKDRTWARAYKPRLSVEAQKLKNEALWALKRTSPEYLKLSRRKEELCRRSINYVIEKTRRRTQCQIVIPVIEDLNVRFFHGSGKRLPGWDNFFTAKKENRWFIQGLHKAFSDLRTHRSFYVFEVRPERTSITCPKCGHCEVGNRDGEAFQCLSCGKTCNADLDVATHNLTQVALTGKTMPKREEPRDAQGTAPARKTKKASKSKAPPAEREDQTPAQEPSQTS

SEQ ID NO: 287 - protein, 766 aa, synthetic construct
  REGION 1..766: note = Description of Artificial Sequence: Synthetic polypeptide
MEKEITELTKIRREFPNKKFSSTDMKKAGKLLKAEGPDAVRDFLNSCQEIIGDFKPPVKTNIVSISRPFEEWPVSMVGRAIQEYYFSLTKEELESVHPGTSSEDHKSFFNITGLSNYNYTSVQGLNLIFKNAKAIYDGTLVKANNKNKKLEKKFNEINHKRSLEGLPIITPDFEEPFDENGHLNNPPGINRNIYGYQGCAAKVFVPSKHKMVSLPKEYEGYNRDPNLSLAGFRNRLEIPEGEPGHVPWFQRMDIPEGQIGHVNKIQRFNFVHGKNSGKVKFSDKTGRVKRYHHSKYKDATKPYKFLEESKKVSALDSILAIITIGDDWVVFDIRGLYRNVFYRELAQKGLTAVQLLDLFTGDPVIDPKKGVVTFSYKEGVVPVFSQKIVPRFKSRDTLEKLTSQGPVALLSVDLGQNEPVAARVCSLKNINDKITLDNSCRISFLDDYKKQIKDYRDSLDELEIKIRLEAINSLETNQQVEIRDLDVFSADRAKANTVDMFDIDPNLISWDSMSDARVSTQISDLYLKNGGDESRVYFEINNKRIKRSDYNISQLVRPKLSDSTRKNLNDSIWKLKRTSEEYLKLSKRKLELSRAVVNYTIRQSKLLSGINDIVIILEDLDVKKKFNGRGIRDIGWDNFFSSRKENRWFIPAFHKAFSELSSNRGLCVIEVNPAWTSATCPDCGFCSKENRDGINFTCRKCGVSYHADIDVATLNIARVAVLGKPMSGPADRERLGDTKKPRVARSRKTMKRKDISNSTVEAMVTA

SEQ ID NO: 288 - protein, 765 aa, synthetic construct
  REGION 1..765: note = Description of Artificial Sequence: Synthetic polypeptide
MYSLEMADLKSEPSLLAKLLRDRFPGKYWLPKYWKLAEKKRLTGGEEAACEYMADKQLDSPPPNFRPPARCVILAKSRPFEDWPVHRVASKAQSFVIGLSEQGFAALRAAPPSTADARRDWLRSHGASEDDLMALEAQLLETIMGNAISLHGGVLKKIDNANVKAAKRLSGRNEARLNKGLQELPPEQEGSAYGADGLLVNPPGLNLNIYCRKSCCPKPVKNTARFVGHYPGYLRDSDSILISGTMDRLTIIEGMPGHIPAWQREQGLVKPGGRRRRLSGSESNMRQKVDPSTGPRRSTRSGTVNRSNQRTGRNGDPLLVEIRMKEDWVLLDARGLLRNLRWRESKRGLSCDHEDLSLSGLLALFSGDPVIDPVRNEVVFLYGEGIIPVRSTKPVGTRQSKKLLERQASMGPLTLISCDLGQTNLIAGRASAISLTHGSLGVRSSVRIELDPEIIKSFERLRKDADRLETEILTAAKETLSDEQRGEVNSHEKDSPQTAKASLCRELGLHPPSLPWGQMGPSTTFIADMLISHGRDDDAFLSHGEFPTLEKRKKFDKRFCLESRPLLSSETRKALNESLWEVKRTSSEYARLSQRKKEMARRAVNFVVEISRRKTGLSNVIVNIEDLNVRIFHGGGKQAPGWDGFFRPKSENRWFIQAIHKAFSDLAAHHGIPVIESDPQRTSMTCPECGHCDSKNRNGVRFLCKGCGASMDADFDAACRNLERVALTGKPMPKPSTSCERLLSATTGKVCSDHSLSHDAIEKAS

SEQ ID NO: 289 - protein, 793 aa, synthetic construct
  REGION 1..793: note = Description of Artificial Sequence: Synthetic polypeptide
MSSLPTPLELLKQKHADLFKGLQFSSKDNKMAGKVLKKDGEEAALAFLSERGVSRGELPNFRPPAKTLVVAQSRPFEEFPIYRVSEAIQLYVYSLSVKELETVPSGSSTKKEHQRFFQDSSVPDFGYTSVQGLNKIFGLARGIYLGVITRGENQLQKAKSKHEALNKKRRASGEAETEFDPTPYEYMTPERKLAKPPGVNHSIMCYVDISVDEFDFRNPDGIVLPSEYAGYCREINTAIEKGTVDRLGHLKGGPGYIPGHQRKESTTEGPKINFRKGRIRRSYTALYAKRDSRRVRQGKLALPSYRHHMMRLNSNAESAILAVIFFGKDWVVFDLRGLLRNVRWRNLFVDGSTPSTLLGMFGDPVIDPKRGVVAFCYKEQIVPVVSKSITKMVKAPELLNKLYLKSEDPLVLVAIDLGQTNPVGVGVYRVMNASLDYEVVTRFALESELLREIESYRQRTNAFEAQIRAETFDAMTSEEQEEITRVRAFSASKAKENVCHRFGMPVDAVDWATMGSNTIHIAKWVMRHGDPSLVEVLEYRKDNEIKLDKNGVPKKVKLTDKRIANLTSIRLRFSQETSKHYNDTMWELRRKHPVYQKLSKSKADFSRRVVNSIIRRVNHLVPRARIVFIIEDLKNLGKVFHGSGKRELGWDSYFEPKSENRWFIQVLHKAFSETGKHKGYYIIECWPNWTSCTCPKCSCCDSENRHGEVFRCLACGYTCNTDFGTAPDNLVKIATTGKGLPGPKKRCKGSSKGKNPKIARSSETGVSVTESGAPKVKKSSPTQTSQSSSQSAP

SEQ ID NO: 290 - protein, 441 aa, synthetic construct
  REGION 1..441: note = Description of Artificial Sequence: Synthetic polypeptide
MNKIEKEKTPLAKLMNENFAGLRFPFAIIKQAGKKLLKEGELKTIEYMTGKGSIEPLPNFKPPVKCLIVAKRRDLKYFPICKASCEIQSYVYSLNYKDFMDYFSTPMTSQKQHEEFFKKSGLNIEYQNVAGLNLIFNNVKNTYNGVILKVKNRNEKLKKKAIKNNYEFEEIKTFNDDGCLINKPGINNVIYCFQSISPKILKNITHLPKEYNDYDCSVDRNIIQKYVSRLDIPESQPGHVPEWQRKLPEFNNTNNPRRRRKWYSNGRNISKGYSVDQVNQAKIEDSLLAQIKIGEDWIILDIRGLLRDLNRRELISYKNKLTIKDVLGFFSDYPIIDIKKNLVTFCYKEGVIQVVSQKSIGNKKSKQLLEKLIENKPIALVSIDLGQTNPVSVKISKLNKINNKISIESFTYRFLNEEILKEIEKYRKDYDKLELKLINEA

SEQ ID NO: 291 - protein, 772 aa, synthetic construct
  REGION 1..772: note = Description of Artificial Sequence: Synthetic polypeptide
MSNTAVSTREHMSNKTTPPSPLSLLLRAHFPGLKFESQDYKIAGKKLRDGGPEAVISYLTGKGQAKLKDVKPPAKAFVIAQSRPFIEWDLVRVSRQIQEKIFGIPATKGRPKQDGLSETAFNEAVASLEVDGKSKLNEETRAAFYEVLGLDAPSLHAQAQNALIKSAISIREGVLKKVENRNEKNLSKTKRRKEAGEEATFVEEKAHDERGYLIHPPGVNQTIPGYQAVVIKSCPSDFIGLPSGCLAKESAEALTDYLPHDRMTIPKGQPGYVPEWQHPLLNRRKNRRRRDWYSASLNKPKATCSKRSGTPNRKNSRTDQIQSGRFKGAIPVLMRFQDEWVIIDIRGLLRNARYRKLLKEKSTIPDLLSLFTGDPSIDMRQGVCTFIYKAGQACSAKMVKTKNAPEILSELTKSGPVVLVSIDLGQTNPIAAKVSRVTQLSDGQLSHETLLRELLSNDSSDGKEIARYRVASDRLRDKLANLAVERLSPEHKSEILRAKNDTPALCKARVCAALGLNPEMIAWDKMTPYTEFLATAYLEKGGDRKVATLKPKNRPEMLRRDIKFKGTEGVRIEVSPEAAEAYREAQWDLQRTSPEYLRLSTWKQELTKRILNQLRHKAAKSSQCEVVVMAFEDLNIKMMHGNGKWADGGWDAFFIKKRENRWFMQAFHKSLTELGAHKGVPTIEVTPHRTSITCTKCGHCDKANRDGERFACQKCGFVAHADLEIATDNIERVALTGKPMPKPESERSGDAKKSVGARKAAFKPEEDAEAAE

SEQ ID NO: 292 - protein, 717 aa, synthetic construct
  REGION 1..717: note = Description of Artificial Sequence: Synthetic polypeptide
MIKPTVSQFLTPGFKLIRNHSRTAGLKLKNEGEEACKKFVRENEIPKDECPNFQGGPAIANIIAKSREFTEWEIYQSSLAIQEVIFTLPKDKLPEPILKEEWRAQWLSEHGLDTVPYKEAAGLNLIIKNAVNTYKGVQVKVDNKNKNNLAKINRKNEIAKLNGEQEISFEEIKAFDDKGYLLQKPSPNKSIYCYQSVSPKPFITSKYHNVNLPEEYIGYYRKSNEPIVSPYQFDRLRIPIGEPGYVPKWQYTFLSKKENKRRKLSKRIKNVSPILGIICIKKDWCVFDMRGLLRTNHWKKYHKPTDSINDLFDYFTGDPVIDTKANVVRFRYKMENGIVNYKPVREKKGKELLENICDQNGSCKLATVDVGQNNPVAIGLFELKKVNGELTKTLISRHPTPIDFCNKITAYRERYDKLESSIKLDAIKQLTSEQKIEVDNYNNNFTPQNTKQIVCSKLNINPNDLPWDKMISGTHFISEKAQVSNKSEIYFTSTDKGKTKDVMKSDYKWFQDYKPKLSKEVRDALSDIEWRLRRESLEFNKLSKSREQDARQLANWISSMCDVIGIENLVKKNNFFGGSGKREPGWDNFYKPKKENRWWINAIHKALTELSQNKGKRVILLPAMRTSITCPKCKYCDSKNRNGEKFNCLKCGIELNADIDVATENLATVAITAQSMPKPTCERSGDAKKPVRARKAKAPEFHDKLAPSYTVVLREAV

SEQ ID NO: 293 - protein, 793 aa, synthetic construct
  REGION 1..793: note = Description of Artificial Sequence: Synthetic polypeptide
MRSSREIGDKILMRQPAEKTAFQVFRQEVIGTQKLSGGDAKTAGRLYKQGKMEAAREWLLKGARDDVPPNFQPPAKCLVVAVSHPFEEWDISKTNHDVQAYIYAQPLQAEGHLNGLSEKWEDTSADQHKLWFEKTGVPDRGLPVQAINKIAKAAVNRAFGVVRKVENRNEKRRSRDNRIAEHNRENGLTEVVREAPEVATNADGFLLHPPGIDPSILSYASVSPVPYNSSKHSFVRLPEEYQAYNVEPDAPIPQFVVEDRFAIPPGQPGYVPEWQRLKCSTNKHRRMRQWSNQDYKPKAGRRAKPLEFQAHLTRERAKGALLVVMRIKEDWVVFDVRGLLRNVEWRKVLSEEAREKLTLKGLLDLFTGDPVIDTKRGIVTFLYKAEITKILSKRTVKTKNARDLLLRLTEPGEDGLRREVGLVAVDLGQTHPIAAAIYRIGRTSAGALESTVLHRQGLREDQKEKLKEYRKRHTALDSRLRKEAFETLSVEQQKEIVTVSGSGAQITKDKVCNYLGVDPSTLPWEKMGSYTHFISDDFLRRGGDPNIVHFDRQPKKGKVSKKSQRIKRSDSQWVGRMRPRLSQETAKARMEADWAAQNENEEYKRLARSKQELARWCVNTLLQNTRCITQCDEIVVVIEDLNVKSLHGKGAREPGWDNFFTPKTENRWFIQILHKTFSELPKHRGEHVIEGCPLRTSITCPACSYCDKNSRNGEKFVCVACGATFHADFEVATYNLVRLATTGMPMPKSLERQGGGEKAGGARKARKKAKQVEKIVVQANANVTMNGASLHSP

SEQ ID NO: 294 - protein, 812 aa, synthetic construct
  REGION 1..812: note = Description of Artificial Sequence: Synthetic polypeptide
MDMLDTETNYATETPAQQQDYSPKPPKKAQRAPKGFSKKARPEKKPPKPITLFTQKHFSGVRFLKRVIRDASKILKLSESRTITFLEQAIERDGSAPPDVTPPVHNTIMAVTRPFEEWPEVILSKALQKHCYALTKKIKIKTWPKKGPGKKCLAAWSARTKIPLIPGQVQATNGLFDRIGSIYDGVEKKVTNRNANKKLEYDEAIKEGRNPAVPEYETAYNIDGTLINKPGYNPNLYITQSRTPRLITEADRPLVEKILWQMVEKKTQSRNQARRARLEKAAHLQGLPVPKFVPEKVDRSQKIEIRIIDPLDKIEPYMPQDRMAIKASQDGHVPYWQRPFLSKRRNRRVRAGWGKQVSSIQAWLTGALLVIVRLGNEAFLADIRGALRNAQWRKLLKPDATYQSLFNLFTGDPVVNTRTNHLTMAYREGVVNIVKSRSFKGRQTREHLLTLLGQGKTVAGVSFDLGQKHAAGLLAAHFGLGEDGNPVFTPIQACFLPQRYLDSLTNYRNRYDALTLDMRRQSLLALTPAQQQEFADAQRDPGGQAKRACCLKLNLNPDEIRWDLVSGISTMISDLYIERGGDPRDVHQQVETKPKGKRKSEIRILKIRDGKWAYDFRPKIADETRKAQREQLWKLQKASSEFERLSRYKINIARAIANWALQWGRELSGCDIVIPVLEDLNVGSKFFDGKGKWLLGWDNRFTPKKENRWFIKVLHKAVAELAPHRGVPVYEVMPHRTSMTCPACHYCHPTNREGDRFECQSCHVVKNTDRDVAPYNILRVAVEGKTLDRWQAEKKPQAEPDRPMILIDNQES

SEQ ID NO: 295-1303 - skipped (1009 entries)

SEQ ID NO: 1304 - protein, 1368 aa, synthetic construct
  REGION 1..1368: note = Description of Artificial Sequence: Synthetic polypeptide
MDKKYSIGLAIGTNSVGWAVITDEYKVPSKKFKVLGNTDRHSIKKNLIGALLFDSGETAEATRLKRTARRRYTRRKNRICYLQEIFSNEMAKVDDSFFHRLEESVLVEEDKKHERHPIFGNIVDEVAYHEKYPTIYHLRKKLVDSTDKADLRLIYLALAHMIKFRGHFLIEGDLNPDNSDVDKLFIQLVQTYNQLFEENPINASGVDAKAILSARLSKSRRLENLIAQLPGEKKNGLFGNLIALSLGLTPNFKSNFDLAEDAKLQLSKDTYDDDLDNLLAQIGDQYADLFLAAKNLSDAILLSDILRVNTEITKAPLSASMIKRYDEHHQDLTLLKALVRQQLPEKYKEIFFDQSKNGYAGYIDGGASQEEFYKFIKPILEKMDGTEELLVKLNREDLLRKQRTFDNGSIPHQIHLGELHAILRRQEDFYPFLKDNREKIEKILTFRIPYYVGPLARGNSRFAWMTRKSEETITPWNFEEVVDKGASAQSFIERMTNFDKNLPNEKVLPKHSLLYEYFTVYNELTKVKYVTEGMRKPAFLSGEQKKAIVDLLFKTNRKVTVKQLKEDYFKKIECFDSVEISGVEDRFNASLGTYHDLLKIIKDKDFLDNEENEDILEDIVLTLTLFEDREMIEERLKTYAHLFDDKVMKQLKRRRYTGWGRLSRKLINGIRDKQSGKTILDFLKSDGFANRNFMQLIHDDSLTFKEDIQKAQVSGQGDSLHEHIANLAGSPAIKKGILQTVKVVDELVKVMGRHKPENIVIEMARENQTTQKGQKNSRERMKRIEEGIKELGSQILKEHPVENTQLQNEKLYLYYLQNGRDMYVDQELDINRLSDYDVDHIVPQSFLKDDSIDNKVLTRSDKNRGKSDNVPSEEVVKKMKNYWRQLLNAKLITQRKFDNLTKAERGGLSELDKAGFIKRQLVETRQITKHVAQILDSRMNTKYDENDKLIREVKVITLKSKLVSDFRKDFQFYKVREINNYHHAHDAYLNAVVGTALIKKYPKLESEFVYGDYKVYDVRKMIAKSEQEIGKATAKYFFYSNIMNFFKTEITLANGEIRKRPLIETNGETGEIVWDKGRDFATVRKVLSMPQVNIVKKTEVQTGGFSKESILPKRNSDKLIARKKDWDPKKYGGFESPTVAYSVLVVAKVEKGKSKKLKSVKELLGITIMERSSFEKNPIDFLEAKGYKEVKKDLIIKLPKYSLFELENGRKRMLASAGELQKGNELALPSKYVNFLYLASHYEKLKGSPEDNEQKQLFVEQHKHYLDEIIEQISEFSKRVILADANLDKVLSAYNKHRDKPIREQAENIIHLFTLTNLGAPAAFKYFDTTIDRKQYRSTKEVLDATLIHQSITGLYETRIDLSQLGGD

SEQ ID NO: 1305 - protein, 1368 aa, synthetic construct
  REGION 1..1368: note = Description of Artificial Sequence: Synthetic polypeptide
MDKKYSIGLAIGTNSVGWAVITDEYKVPSKKFKVLGNTDRHSIKKNLIGALLFDSGETAEATRLKRTARRRYTRRKNRICYLQEIFSNEMAKVDDSFFHRLEESFLVEEDKKHERHPIFGNIVDEVAYHEKYPTIYHLRKKLVDSTDKADLRLIYLALAHMIKFRGHFLIEGDLNPDNSDVDKLFIQLVQTYNQLFEENPINASGVDAKAILSARLSKSRRLENLIAQLPGEKKNGLFGNLIALSLGLTPNFKSNFDLAEDAKLQLSKDTYDDDLDNLLAQIGDQYADLFLAAKNLSDAILLSDILRVNTEITKAPLSASMIKRYDEHHQDLTLLKALVRQQLPEKYKEIFFDQSKNGYAGYIDGGASQEEFYKFIKPILEKMDGTEELLVKLNREDLLRKQRTFDNGSIPHQIHLGELHAILRRQEDFYPFLKDNREKIEKILTFRIPYYVGPLARGNSRFAWMTRKSEETITPWNFEEVVDKGASAQSFIERMTNFDKNLPNEKVLPKHSLLYEYFTVYNELTKVKYVTEGMRKPAFLSGEQKKAIVDLLFKTNRKVTVKQLKEDYFKKIECFDSVEISGVEDRFNASLGTYHDLLKIIKDKDFLDNEENEDILEDIVLTLTLFEDREMIEERLKTYAHLFDDKVMKQLKRRRYTGWGRLSRKLINGIRDKQSGKTILDFLKSDGFANRNFMQLIHDDSLTFKEDIQKAQVSGQGDSLHEHIANLAGSPAIKKGILQTVKVVDELVKVMGRHKPENIVIEMARENQTTQKGQKNSRERMKRIEEGIKELGSQILKEHPVENTQLQNEKLYLYYLQNGRDMYVDQELDINRLSDYDVDHIVPQSFLKDDSIDNKVLTRSDKNRGKSDNVPSEEVVKKMKNYWRQLLNAKLITQRKFDNLTKAERGGLSELDKAGFIKRQLVETRQITKHVAQILDSRMNTKYDENDKLIREVKVITLKSKLVSDFRKDFQFYKVREINNYHHAHDAYLNAVVGTALIKKYPKLESEFVYGDYKVYDVRKMIAKSEQEIGKATAKYFFYSNIMNFFKTEITLANGEIRKRPLIETNGETGEIVWDKGRDFATVRKVLSMPQVNIVKKTEVQTGGFSKESILPKRNSDKLIARKKDWDPKKYGGFVSPTVAYSVLVVAKVEKGKSKKLKSVKELLGITIMERSSFEKNPIDFLEAKGYKEVKKDLIIKLPKYSLFELENGRKRMLASAGELQKGNELALPSKYVNFLYLASHYEKLKGSPEDNEQKQLFVEQHKHYLDEIIEQISEFSKRVILADANLDKVLSAYNKHRDKPIREQAENIIHLFTLTNLGAPAAFKYFDTTIDRKQYRSTKEVLDATLIHQSITGLYETRIDLSQLGGD

SEQ ID NO: 1306 - protein, 1368 aa, synthetic construct
  REGION 1..1368: note = Description of Artificial Sequence: Synthetic polypeptide
MDKKYSIGLAIGTNSVGWAVITDEYKVPSKKFKVLGNTDRHSIKKNLIGALLFDSGETAEATRLKRTARRRYTRRKNRICYLQEIFSNEMAKVDDSFFHRLEESFLVEEDKKHERHPIFGNIVDEVAYHEKYPTIYHLRKKLVDSTDKADLRLIYLALAHMIKFRGHFLIEGDLNPDNSDVDKLFIQLVQTYNQLFEENPINASGVDAKAILSARLSKSRRLENLIAQLPGEKKNGLFGNLIALSLGLTPNFKSNFDLAEDAKLQLSKDTYDDDLDNLLAQIGDQYADLFLAAKNLSDAILLSDILRVNTEITKAPLSASMIKRYDEHHQDLTLLKALVRQQLPEKYKEIFFDQSKNGYAGYIDGGASQEEFYKFIKPILEKMDGTEELLVKLNREDLLRKQRTFDNGSIPHQIHLGELHAILRRQEDFYPFLKDNREKIEKILTFRIPYYVGPLARGNSRFAWMTRKSEETITPWNFEEVVDKGASAQSFIERMTNFDKNLPNEKVLPKHSLLYEYFTVYNELTKVKYVTEGMRKPAFLSGEQKKAIVDLLFKTNRKVTVKQLKEDYFKKIECFDSVEISGVEDRFNASLGTYHDLLKIIKDKDFLDNEENEDILEDIVLTLTLFEDREMIEERLKTYAHLFDDKVMKQLKRRRYTGWGRLSRKLINGIRDKQSGKTILDFLKSDGFANRNFMQLIHDDSLTFKEDIQKAQVSGQGDSLHEHIANLAGSPAIKKGILQTVKVVDELVKVMGRHKPENIVIEMARENQTTQKGQKNSRERMKRIEEGIKELGSQILKEHPVENTQLQNEKLYLYYLQNGRDMYVDQELDINRLSDYDVDHIVPQSFLKDDSIDNKVLTRSDKNRGKSDNVPSEEVVKKMKNYWRQLLNAKLITQRKFDNLTKAERGGLSELDKAGFIKRQLVETRQITKHVAQILDSRMNTKYDENDKLIREVKVITLKSKLVSDFRKDFQFYKVREINNYHHAHDAYLNAVVGTALIKKYPKLESEFVYGDYKVYDVRKMIAKSEQEIGKATAKYFFYSNIMNFFKTEITLANGEIRKRPLIETNGETGEIVWDKGRDFATVRKVLSMPQVNIVKKTEVQTGGFSKESILPKRNSDKLIARKKDWDPKKYGGFVSPTVAYSVLVVAKVEKGKSKKLKSVKELLGITIMERSSFEKNPIDFLEAKGYKEVKKDLIIKLPKYSLFELENGRKRMLASARELQKGNELALPSKYVNFLYLASHYEKLKGSPEDNEQKQLFVEQHKHYLDEIIEQISEFSKRVILADANLDKVLSAYNKHRDKPIREQAENIIHLFTLTNLGAPAAFKYFDTTIDRKEYRSTKEVLDATLIHQSITGLYETRIDLSQLGGD

SEQ ID NO: 1307 - protein, 1359 aa, synthetic construct
  REGION 1..1359: note = Description of Artificial Sequence: Synthetic polypeptide
MDKKYSIGLDIGTNSVGWAVITDDYKVPSKKFKVLGNTDRHSIKKNLIGALLFGSGETAEATRLKRTARRRYTRRKNRICYLQEIFSNEMAKVDDSFFHRLEESFLVEEDKKHERHPIFGNIVDEVAYHEKYPTIYHLRKKLADSTDKADLRLIYLALAHMIKFRGHFLIEGDLNPDNSDVDKLFIQLVQIYNQLFEENPINASRVDAKAILSARLSKSRRLENLIAQLPGEKRNGLFGNLIALSLGLTPNFKSNFDLAEDAKLQLSKDTYDDDLDNLLAQIGDQYADLFLAAKNLSDAILLSDILRVNSEITKAPLSASMIKRYDEHHQDLTLLKALVRQQLPEKYKEIFFDQSKNGYAGYIDGGASQEEFYKFIKPILEKMDGTEELLVKLNREDLLRKQRTFDNGSIPHQIHLGELHAILRRQEDFYPFLKDNREKIEKILTFRIPYYVGPLARGNSRFAWMTRKSEETITPWNFEEVVDKGASAQSFIERMTNFDKNLPNEKVLPKHSLLYEYFTVYNELTKVKYVTEGMRKPAFLSGEQKKAIVDLLFKTNRKVTVKQLKEDYFKKIECFDSVEISGVEDRFNASLGAYHDLLKIIKDKDFLDNEENEDILEDIVLTLTLFEDRGMIEERLKTYAHLFDDKVMKQLKRRRYTGWGRLSRKLINGIRDKQSGKTILDFLKSDGFANRNFMQLIHDDSLTFKEDIQKAQVSGQGHSLHEQIANLAGSPAIKKGILQTVKIVDELVKVMGHKPENIVIEMARENQTTQKGQKNSRERMKRIEEGIKELGSQILKEHPVENTQLQNEKLYLYYLQNGRDMYVDQELDINRLSDYDVDHIVPQSFIKDDSIDNKVLTRSDKNRGKSDNVPSEEVVKKMKNYWRQLLNAKLITQRKFDNLTKAERGGLSELDKAGFIKRQLVETRQITKHVAQILDSRMNTKYDENDKLIREVKVITLKSKLVSDFRKDFQFYKVREINNYHHAHDAYLNAVVGTALIKKYPKLESEFVYGDYKVYDVRKMIAKSEQEIGKATAKYFFYSNIMNFFKTEITLANGEIRKRPLIETNGETGEIVWDKGRDFATVRKVLSMPQVNIVKKTEIQTVGQNGGLFDDNPKSPLEVTPSKLVPLKKELNPKKYGGYQKPTTAYPVLLITDTKQLIPISVMNKKQFEQNPVKFLRDRGYQQVGKNDFIKLPKYTLVDIGDGIKRLWASSKEIHKGNQLVVSKKSQILLYHAHHLDSDLSNDYLQNHNQQFDVLFNEIISFSKKCKLGKEHIQKIENVYSNKKNSASIEELAESFIKLLGFTQLGATSPFNFLGVKLNQKQYKGKKDYILPCTEGTLIRQSITGLYETRVDLSKIGED

SEQ ID NO: 1308 - protein, 4 aa, synthetic construct
  REGION 1..4: note = Description of Artificial Sequence: Synthetic peptide
GGGS

SEQ ID NO: 1309 - protein, 5 aa, synthetic construct
  REGION 1..5: note = Description of Artificial Sequence: Synthetic peptide
EAAAK

SEQ ID NO: 1310 - protein, 20 aa, synthetic construct
  REGION 1..20: note = Description of Artificial Sequence: Synthetic peptide
GSSGSETPGTSESATPESSG

SEQ ID NO: 1311 - DNA, 18 bp, synthetic construct
  misc_feature 1..18: note = Description of Artificial Sequence: Synthetic oligonucleotide
  source 1..18: mol_type = other DNA
ggaggctctggaggaagc

SEQ ID NO: 1312 - DNA, 60 bp, synthetic construct
  misc_feature 1..60: note = Description of Artificial Sequence: Synthetic oligonucleotide
  source 1..60: mol_type = other DNA
ggctcttctggatctgaaacacctggcacaagcgagagcgccacccctgagagctctggc

SEQ ID NO: 1313 - protein, 17 aa, synthetic construct
  REGION 1..17: note = Description of Artificial Sequence: Synthetic peptide
MAPKKKRKVGIHGVPAA

SEQ ID NO: 1314 - DNA, 51 bp, synthetic construct
  misc_feature 1..51: note = Description of Artificial Sequence: Synthetic oligonucleotide
  source 1..51: mol_type = other DNA
atggccccaaagaagaagcggaaggtcggtatccacggagtcccagcagcc

SEQ ID NO: 1315 - protein, 1554 aa, synthetic construct
  REGION 1..1554: note = Description of Artificial Sequence: Synthetic polypeptide
MDKKYSIGLAIGTNSVGWAVITDEYKVPSKKFKVLGNTDRHSIKKNLIGALLFDSGETAEATRLKRTARRRYTRRKNRICYLQEIFSNEMAKVDDSFFHRLEESFLVEEDKKHERHPIFGNIVDEVAYHEKYPTIYHLRKKLVDSTDKADLRLIYLALAHMIKFRGHFLIEGDLNPDNSDVDKLFIQLVQTYNQLFEENPINASGVDAKAILSARLSKSRRLENLIAQLPGEKKNGLFGNLIALSLGLTPNFKSNFDLAEDAKLQLSKDTYDDDLDNLLAQIGDQYADLFLAAKNLSDAILLSDILRVNTEITKAPLSASMIKRYDEHHQDLTLLKALVRQQLPEKYKEIFFDQSKNGYAGYIDGGASQEEFYKFIKPILEKMDGTEELLVKLNREDLLRKQRTFDNGSIPHQIHLGELHAILRRQEDFYPFLKDNREKIEKILTFRIPYYVGPLARGNSRFAWMTRKSEETITPWNFEEVVDKGASAQSFIERMTNFDKNLPNEKVLPKHSLLYEYFTVYNELTKVKYVTEGMRKPAFLSGEQKKAIVDLLFKTNRKVTVKQLKEDYFKKIECFDSVEISGVEDRFNASLGTYHDLLKIIKDKDFLDNEENEDILEDIVLTLTLFEDREMIEERLKTYAHLFDDKVMKQLKRRRYTGWGRLSRKLINGIRDKQSGKTILDFLKSDGFANRNFMQLIHDDSLTFKEDIQKAQVSGQGDSLHEHIANLAGSPAIKKGILQTVKVVDELVKVMGRHKPENIVIEMARENQTTQKGQKNSRERMKRIEEGIKELGSQILKEHPVENTQLQNEKLYLYYLQNGRDMYVDQELDINRLSDYDVDHIVPQSFLKDDSIDNKVLTRSDKNRGKSDNVPSEEVVKKMKNYWRQLLNAKLITQRKFDNLTKAERGGLSELDKAGFIKRQLVETRQITKHVAQILDSRMNTKYDENDKLIREVKVITLKSKLVSDFRKDFQFYKVREINNYHHAHDAYLNAVVGTALIKKYPKLESEFVYGDYKVGSSGSETPGTSESATPESSGSEVEFSHEYWMRHALTLAKRARDEREVPVGAVLVLNNRVIGEGWNRAIGLHDPTAHAEIMALRQGGLVMQNYRLIDATLYVTFEPCVMCAGAMIHSRIGRVVFGVRNAKTGAAGSLMDVLHYPGMNHRVEITEGILADECAALLCYFFRMPRQVFNAQKKAQSSTDYDVRKMIAKSEQEIGKATAKYFFYSNIMNFFKTEITLANGEIRKRPLIETNGETGEIVWDKGRDFATVRKVLSMPQVNIVKKTEVQTGGFSKESILPKRNSDKLIARKKDWDPKKYGGFDSPTVAYSVLVVAKVEKGKSKKLKSVKELLGITIMERSSFEKNPIDFLEAKGYKEVKKDLIIKLPKYSLFELENGRKRMLASAGELQKGNELALPSKYVNFLYLASHYEKLKGSPEDNEQKQLFVEQHKHYLDEIIEQISEFSKRVILADANLDKVLSAYNKHRDKPIREQAENIIHLFTLTNLGAPAAFKYFDTTIDRKRYTSTKEVLDATLIHQSITGLYETRIDLSQLGGD

SEQ ID NO: 1316 - protein, 1554 aa, synthetic construct
  REGION 1..1554: note = Description of Artificial Sequence: Synthetic polypeptide
MDKKYSIGLAIGTNSVGWAVITDEYKVPSKKFKVLGNTDRHSIKKNLIGALLFDSGETAEATRLKRTARRRYTRRKNRICYLQEIFSNEMAKVDDSFFHRLEESFLVEEDKKHERHPIFGNIVDEVAYHEKYPTIYHLRKKLVDSTDKADLRLIYLALAHMIKFRGHFLIEGDLNPDNSDVDKLFIQLVQTYNQLFEENPINASGVDAKAILSARLSKSRRLENLIAQLPGEKKNGLFGNLIALSLGLTPNFKSNFDLAEDAKLQLSKDTYDDDLDNLLAQIGDQYADLFLAAKNLSDAILLSDILRVNTEITKAPLSASMIKRYDEHHQDLTLLKALVRQQLPEKYKEIFFDQSKNGYAGYIDGGASQEEFYKFIKPILEKMDGTEELLVKLNREDLLRKQRTFDNGSIPHQIHLGELHAILRRQEDFYPFLKDNREKIEKILTFRIPYYVGPLARGNSRFAWMTRKSEETITPWNFEEVVDKGASAQSFIERMTNFDKNLPNEKVLPKHSLLYEYFTVYNELTKVKYVTEGMRKPAFLSGEQKKAIVDLLFKTNRKVTVKQLKEDYFKKIECFDSVEISGVEDRFNASLGTYHDLLKIIKDKDFLDNEENEDILEDIVLTLTLFEDREMIEERLKTYAHLFDDKVMKQLKRRRYTGWGRLSRKLINGIRDKQSGKTILDFLKSDGFANRNFMQLIHDDSLTFKEDIQKAQVSGQGDSLHEHIANLAGSPAIKKGILQTVKVVDELVKVMGRHKPENIVIEMARENQTTQKGQKNSRERMKRIEEGIKELGSQILKEHPVENTQLQNEKLYLYYLQNGRDMYVDQELDINRLSDYDVDHIVPQSFLKDDSIDNKVLTRSDKNRGKSDNVPSEEVVKKMKNYWRQLLNAKLITQRKFDNLTKAERGGLSELDKAGFIKRQLVETRQITKHVAQILDSRMNTKYDENDKLIREVKVITLKSKLVSDFRKDFQFYKVREINNYHHAHDAYLNAVVGTALIKKYPKLESEFVYGDYKVYDVRKMIGSSGSETPGTSESATPESSGSEVEFSHEYWMRHALTLAKRARDEREVPVGAVLVLNNRVIGEGWNRAIGLHDPTAHAEIMALRQGGLVMQNYRLIDATLYVTFEPCVMCAGAMIHSRIGRVVFGVRNAKTGAAGSLMDVLHYPGMNHRVEITEGILADECAALLCYFFRMPRQVFNAQKKAQSSTDAKSEQEIGKATAKYFFYSNIMNFFKTEITLANGEIRKRPLIETNGETGEIVWDKGRDFATVRKVLSMPQVNIVKKTEVQTGGFSKESILPKRNSDKLIARKKDWDPKKYGGFDSPTVAYSVLVVAKVEKGKSKKLKSVKELLGITIMERSSFEKNPIDFLEAKGYKEVKKDLIIKLPKYSLFELENGRKRMLASAGELQKGNELALPSKYVNFLYLASHYEKLKGSPEDNEQKQLFVEQHKHYLDEIIEQISEFSKRVILADANLDKVLSAYNKHRDKPIREQAENIIHLFTLTNLGAPAAFKYFDTTIDRKRYTSTKEVLDATLIHQSITGLYETRIDLSQLGGD

SEQ ID NO: 1317 - protein, 1554 aa, synthetic construct
  REGION 1..1554: note = Description of Artificial Sequence: Synthetic polypeptide
MDKKYSIGLAIGTNSVGWAVITDEYKVPSKKFKVLGNTDRHSIKKNLIGALLFDSGETAEATRLKRTARRRYTRRKNRICYLQEIFSNEMAKVDDSFFHRLEESFLVEEDKKHERHPIFGNIVDEVAYHEKYPTIYHLRKKLVDSTDKADLRLIYLALAHMIKFRGHFLIEGDLNPDNSDVDKLFIQLVQTYNQLFEENPINASGVDAKAILSARLSKSRRLENLIAQLPGEKKNGLFGNLIALSLGLTPNFKSNFDLAEDAKLQLSKDTYDDDLDNLLAQIGDQYADLFLAAKNLSDAILLSDILRVNTEITKAPLSASMIKRYDEHHQDLTLLKALVRQQLPEKYKEIFFDQSKNGYAGYIDGGASQEEFYKFIKPILEKMDGTEELLVKLNREDLLRKQRTFDNGSIPHQIHLGELHAILRRQEDFYPFLKDNREKIEKILTFRIPYYVGPLARGNSRFAWMTRKSEETITPWNFEEVVDKGASAQSFIERMTNFDKNLPNEKVLPKHSLLYEYFTVYNELTKVKYVTEGMRKPAFLSGEQKKAIVDLLFKTNRKVTVKQLKEDYFKKIECFDSVEISGVEDRFNASLGTYHDLLKIIKDKDFLDNEENEDILEDIVLTLTLFEDREMIEERLKTYAHLFDDKVMKQLKRRRYTGWGRLSRKLINGIRDKQSGKTILDFLKSDGFANRNFMQLIHDDSLTFKEDIQKAQVSGQGDSLHEHIANLAGSPAIKKGILQTVKVVDELVKVMGRHKPENIVIEMARENQTTQKGQKNSRERMKRIEEGIKELGSQILKEHPVENTQLQNEKLYLYYLQNGRDMYVDQELDINRLSDYDVDHIVPQSFLKDDSIDNKVLTRSDKNRGKSDNVPSEEVVKKMKNYWRQLLNAKLITQRKFDNLTKAERGGLSELDKAGFIKRQLVETRQITKHVAQILDSRMNTKYDENDKLIREVKVITLKSKLVSDFRKDFQFYKVREINNYHHAHDAYLNAVVGTALIKKYPKLESEFVYGDYKVYDVRKMIAKSEQEIGSSGSETPGTSESATPESSGSEVEFSHEYWMRHALTLAKRARDEREVPVGAVLVLNNRVIGEGWNRAIGLHDPTAHAEIMALRQGGLVMQNYRLIDATLYVTFEPCVMCAGAMIHSRIGRVVFGVRNAKTGAAGSLMDVLHYPGMNHRVEITEGILADECAALLCYFFRMPRQVFNAQKKAQSSTDGKATAKYFFYSNIMNFFKTEITLANGEIRKRPLIETNGETGEIVWDKGRDFATVRKVLSMPQVNIVKKTEVQTGGFSKESILPKRNSDKLIARKKDWDPKKYGGFDSPTVAYSVLVVAKVEKGKSKKLKSVKELLGITIMERSSFEKNPIDFLEAKGYKEVKKDLIIKLPKYSLFELENGRKRMLASAGELQKGNELALPSKYVNFLYLASHYEKLKGSPEDNEQKQLFVEQHKHYLDEIIEQISEFSKRVILADANLDKVLSAYNKHRDKPIREQAENIIHLFTLTNLGAPAAFKYFDTTIDRKRYTSTKEVLDATLIHQSITGLYETRIDLSQLGGD

SEQ ID NO: 1318 - protein, 1554 aa, synthetic construct
  REGION 1..1554: note = Description of Artificial Sequence: Synthetic polypeptide
MDKKYSIGLAIGTNSVGWAVITDEYKVPSKKFKVLGNTDRHSIKKNLIGALLFDSGETAEATRLKRTARRRYTRRKNRICYLQEIFSNEMAKVDDSFFHRLEESFLVEEDKKHERHPIFGNIVDEVAYHEKYPTIYHLRKKLVDSTDKADLRLIYLALAHMIKFRGHFLIEGDLNPDNSDVDKLFIQLVQTYNQLFEENPINASGVDAKAILSARLSKSRRLENLIAQLPGEKKNGLFGNLIALSLGLTPNFKSNFDLAEDAKLQLSKDTYDDDLDNLLAQIGDQYADLFLAAKNLSDAILLSDILRVNTEITKAPLSASMIKRYDEHHQDLTLLKALVRQQLPEKYKEIFFDQSKNGYAGYIDGGASQEEFYKFIKPILEKMDGTEELLVKLNREDLLRKQRTFDNGSIPHQIHLGELHAILRRQEDFYPFLKDNREKIEKILTFRIPYYVGPLARGNSRFAWMTRKSEETITPWNFEEVVDKGASAQSFIERMTNFDKNLPNEKVLPKHSLLYEYFTVYNELTKVKYVTEGMRKPAFLSGEQKKAIVDLLFKTNRKVTVKQLKEDYFKKIECFDSVEISGVEDRFNASLGTYHDLLKIIKDKDFLDNEENEDILEDIVLTLTLFEDREMIEERLKTYAHLFDDKVMKQLKRRRYTGWGRLSRKLINGIRDKQSGKTILDFLKSDGFANRNFMQLIHDDSLTFKEDIQKAQVSGQGDSLHEHIANLAGSPAIKKGILQTVKVVDELVKVMGRHKPENIVIEMARENQTTQKGQKNSRERMKRIEEGIKELGSQILKEHPVENTQLQNEKLYLYYLQNGRDMYVDQELDINRLSDYDVDHIVPQSFLKDDSIDNKVLTRSDKNRGKSDNVPSEEVVKKMKNYWRQLLNAKLITQRKFDNLTKAERGGLSELDKAGFIKRQLVETRQITKHVAQILDSRMNTKYDENDKLIREVKVITLKSKLVSDFRKDFQFYKVREINNYHHAHDAYLNAVVGTALIKKYPKLESEFVYGDYKVYDVRKMIAKSEQEIGKATAKYFFYSGSSGSETPGTSESATPESSGSEVEFSHEYWMRHALTLAKRARDEREVPVGAVLVLNNRVIGEGWNRAIGLHDPTAHAEIMALRQGGLVMQNYRLIDATLYVTFEPCVMCAGAMIHSRIGRVVFGVRNAKTGAAGSLMDVLHYPGMNHRVEITEGILADECAALLCYFFRMPRQVFNAQKKAQSSTDNIMNFFKTEITLANGEIRKRPLIETNGETGEIVWDKGRDFATVRKVLSMPQVNIVKKTEVQTGGFSKESILPKRNSDKLIARKKDWDPKKYGGFDSPTVAYSVLVVAKVEKGKSKKLKSVKELLGITIMERSSFEKNPIDFLEAKGYKEVKKDLIIKLPKYSLFELENGRKRMLASAGELQKGNELALPSKYVNFLYLASHYEKLKGSPEDNEQKQLFVEQHKHYLDEIIEQISEFSKRVILADANLDKVLSAYNKHRDKPIREQAENIIHLFTLTNLGAPAAFKYFDTTIDRKRYTSTKEVLDATLIHQSITGLYETRIDLSQLGGD

SEQ ID NO: 1319 - protein, 1554 aa, synthetic construct
  REGION 1..1554: note = Description of Artificial Sequence: Synthetic polypeptide
MDKKYSIGLAIGTNSVGWAVITDEYKVPSKKFKVLGNTDRHSIKKNLIGALLFDSGETAEATRLKRTARRRYTRRKNRICYLQEIFSNEMAKVDDSFFHRLEESFLVEEDKKHERHPIFGNIVDEVAYHEKYPTIYHLRKKLVDSTDKADLRLIYLALAHMIKFRGHFLIEGDLNPDNSDVDKLFIQLVQTYNQLFEENPINASGVDAKAILSARLSKSRRLENLIAQLPGEKKNGLFGNLIALSLGLTPNFKSNFDLAEDAKLQLSKDTYDDDLDNLLAQIGDQYADLFLAAKNLSDAILLSDILRVNTEITKAPLSASMIKRYDEHHQDLTLLKALVRQQLPEKYKEIFFDQSKNGYAGYIDGGASQEEFYKFIKPILEKMDGTEELLVKLNREDLLRKQRTFDNGSIPHQIHLGELHAILRRQEDFYPFLKDNREKIEKILTFRIPYYVGPLARGNSRFAWMTRKSEETITPWNFEEVVDKGASAQSFIERMTNFDKNLPNEKVLPKHSLLYEYFTVYNELTKVKYVTEGMRKPAFLSGEQKKAIVDLLFKTNRKVTVKQLKEDYFKKIECFDSVEISGVEDRFNASLGTYHDLLKIIKDKDFLDNEENEDILEDIVLTLTLFEDREMIEERLKTYAHLFDDKVMKQLKRRRYTGWGRLSRKLINGIRDKQSGKTILDFLKSDGFANRNFMQLIHDDSLTFKEDIQKAQVSGQGDSLHEHIANLAGSPAIKKGILQTVKVVDELVKVMGRHKPENIVIEMARENQTTQKGQKNSRERMKRIEEGIKELGSQILKEHPVENTQLQNEKLYLYYLQNGRDMYVDQELDINRLSDYDVDHIVPQSFLKDDSIDNKVLTRSDKNRGKSDNVPSEEVVKKMKNYWRQLLNAKLITQRKFDNLTKAERGGLSELDKAGFIKRQLVETRQITKHVAQILDSRMNTKYDENDKLIREVKVITLKSKLVSDFRKDFQFYKVREINNYHHAHDAYLNAVVGTALIKKYPKLESEFVYGDYKVYDVRKMIAKSEQEIGKATAKYFFYSNIMNFFKTEITLANGEIRKRPLIETNGEGSSGSETPGTSESATPESSGSEVEFSHEYWMRHALTLAKRARDEREVPVGAVLVLNNRVIGEGWNRAIGLHDPTAHAEIMALRQGGLVMQNYRLIDATLYVTFEPCVMCAGAMIHSRIGRVVFGVRNAKTGAAGSLMDVLHYPGMNHRVEITEGILADECAALLCYFFRMPRQVFNAQKKAQSSTDTGEIVWDKGRDFATVRKVLSMPQVNIVKKTEVQTGGFSKESILPKRNSDKLIARKKDWDPKKYGGFDSPTVAYSVLVVAKVEKGKSKKLKSVKELLGITIMERSSFEKNPIDFLEAKGYKEVKKDLIIKLPKYSLFELENGRKRMLASAGELQKGNELALPSKYVNFLYLASHYEKLKGSPEDNEQKQLFVEQHKHYLDEIIEQISEFSKRVILADANLDKVLSAYNKHRDKPIREQAENIIHLFTLTNLGAPAAFKYFDTTIDRKRYTSTKEVLDATLIHQSITGLYETRIDLSQLGGD

SEQ ID NO: 1320 - protein, 1554 aa, synthetic construct
  REGION 1..1554: note = Description of Artificial Sequence: Synthetic polypeptide
MDKKYSIGLAIGTNSVGWAVITDEYKVPSKKFKVLGNTDRHSIKKNLIGALLFDSGETAEATRLKRTARRRYTRRKNRICYLQEIFSNEMAKVDDSFFHRLEESFLVEEDKKHERHPIFGNIVDEVAYHEKYPTIYHLRKKLVDSTDKADLRLIYLALAHMIKFRGHFLIEGDLNPDNSDVDKLFIQLVQTYNQLFEENPINASGVDAKAILSARLSKSRRLENLIAQLPGEKKNGLFGNLIALSLGLTPNFKSNFDLAEDAKLQLSKDTYDDDLDNLLAQIGDQYADLFLAAKNLSDAILLSDILRVNTEITKAPLSASMIKRYDEHHQDLTLLKALVRQQLPEKYKEIFFDQSKNGYAGYIDGGASQEEFYKFIKPILEKMDGTEELLVKLNREDLLRKQRTFDNGSIPHQIHLGELHAILRRQEDFYPFLKDNREKIEKILTFRIPYYVGPLARGNSRFAWMTRKSEETITPWNFEEVVDKGASAQSFIERMTNFDKNLPNEKVLPKHSLLYEYFTVYNELTKVKYVTEGMRKPAFLSGEQKKAIVDLLFKTNRKVTVKQLKEDYFKKIECFDSVEISGVEDRFNASLGTYHDLLKIIKDKDFLDNEENEDILEDIVLTLTLFEDREMIEERLKTYAHLFDDKVMKQLKRRRYTGWGRLSRKLINGIRDKQSGKTILDFLKSDGFANRNFMQLIHDDSLTFKEDIQKAQVSGQGDSLHEHIANLAGSPAIKKGILQTVKVVDELVKVMGRHKPENIVIEMARENQTTQKGQKNSRERMKRIEEGIKELGSQILKEHPVENTQLQNEKLYLYYLQNGRDMYVDQELDINRLSDYDVDHIVPQSFLKDDSIDNKVLTRSDKNRGKSDNVPSEEVVKKMKNYWRQLLNAKLITQRKFDNLTKAERGGLSELDKAGFIKRQLVETRQITKHVAQILDSRMNTKYDENDKLIREVKVITLKSKLVSDFRKDFQFYKVREINNYHHAHDAYLNAVVGTALIKKYPKLESEFVYGDYKVYDVRKMIAKSEQEIGKATAKYFFYSNIMNFFKTEITLANGEIRKRPLIETNGETGEIVWDKGRDFATVRKVLSMPQVNIVKKTEVQTGGFSKESILPKRNSDKLIARKKDWDPKKYGGFDSPTVAYSVLVVAKVEKGKSKKLKSVKELLGITIMERSSFEKNPIDFLEAKGYKEVKKDLIIKLPKYSLFELENGRKRMLASAGELQKGNELALPSKYVNFLYLASHYEKLKGGSSGSETPGTSESATPESSGSEVEFSHEYWMRHALTLAKRARDEREVPVGAVLVLNNRVIGEGWNRAIGLHDPTAHAEIMALRQGGLVMQNYRLIDATLYVTFEPCVMCAGAMIHSRIGRVVFGVRNAKTGAAGSLMDVLHYPGMNHRVEITEGILADECAALLCYFFRMPRQVFNAQKKAQSSTDSPEDNEQKQLFVEQHKHYLDEIIEQISEFSKRVILADANLDKVLSAYNKHRDKPIREQAENIIHLFTLTNLGAPAAFKYFDTTIDRKRYTSTKEVLDATLIHQSITGLYETRIDLSQLGGD

SEQ ID NO: 1321 - protein, 1554 aa, synthetic construct
  REGION 1..1554: note = Description of Artificial Sequence: Synthetic polypeptide
MDKKYSIGLAIGTNSVGWAVITDEYKVPSKKFKVLGNTDRHSIKKNLIGALLFDSGETAEATRLKRTARRRYTRRKNRICYLQEIFSNEMAKVDDSFFHRLEESFLVEEDKKHERHPIFGNIVDEVAYHEKYPTIYHLRKKLVDSTDKADLRLIYLALAHMIKFRGHFLIEGDLNPDNSDVDKLFIQLVQTYNQLFEENPINASGVDAKAILSARLSKSRRLENLIAQLPGEKKNGLFGNLIALSLGLTPNFKSNFDLAEDAKLQLSKDTYDDDLDNLLAQIGDQYADLFLAAKNLSDAILLSDILRVNTEITKAPLSASMIKRYDEHHQDLTLLKALVRQQLPEKYKEIFFDQSKNGYAGYIDGGASQEEFYKFIKPILEKMDGTEELLVKLNREDLLRKQRTFDNGSIPHQIHLGELHAILRRQEDFYPFLKDNREKIEKILTFRIPYYVGPLARGNSRFAWMTRKSEETITPWNFEEVVDKGASAQSFIERMTNFDKNLPNEKVLPKHSLLYEYFTVYNELTKVKYVTEGMRKPAFLSGEQKKAIVDLLFKTNRKVTVKQLKEDYFKKIECFDSVEISGVEDRFNASLGTYHDLLKIIKDKDFLDNEENEDILEDIVLTLTLFEDREMIEERLKTYAHLFDDKVMKQLKRRRYTGWGRLSRKLINGIRDKQSGKTILDFLKSDGFANRNFMQLIHDDSLTFKEDIQKAQVSGQGDSLHEHIANLAGSPAIKKGILQTVKVVDELVKVMGRHKPENIVIEMARENQTTQKGQKNSRERMKRIEEGIKELGSQILKEHPVENTQLQNEKLYLYYLQNGRDMYVDQELDINRLSDYDVDHIVPQSFLKDDSIDNKVLTRSDKNRGKSDNVPSEEVVKKMKNYWRQLLNAKLITQRKFDNLTKAERGGLSELDKAGFIKRQLVETRQITKHVAQILDSRMNTKYDENDKLIREVKVITLKSKLVSDFRKDFQFYKVREINNYHHAHDAYLNAVVGTALIKKYPKLESEFVYGDYKVYDVRKMIAKSEQEIGKATAKYFFYSNIMNFFKTEITLANGSSGSETPGTSESATPESSGSEVEFSHEYWMRHALTLAKRARDEREVPVGAVLVLNNRVIGEGWNRAIGLHDPTAHAEIMALRQGGLVMQNYRLIDATLYVTFEPCVMCAGAMIHSRIGRVVFGVRNAKTGAAGSLMDVLHYPGMNHRVEITEGILADECAALLCYFFRMPRQVFNAQKKAQSSTDGEIRKRPLIETNGETGEIVWDKGRDFATVRKVLSMPQVNIVKKTEVQTGGFSKESILPKRNSDKLIARKKDWDPKKYGGFDSPTVAYSVLVVAKVEKGKSKKLKSVKELLGITIMERSSFEKNPIDFLEAKGYKEVKKDLIIKLPKYSLFELENGRKRMLASAGELQKGNELALPSKYVNFLYLASHYEKLKGSPEDNEQKQLFVEQHKHYLDEIIEQISEFSKRVILADANLDKVLSAYNKHRDKPIREQAENIIHLFTLTNLGAPAAFKYFDTTIDRKRYTSTKEVLDATLIHQSITGLYETRIDLSQLGGD

SEQ ID NO: 1322 - protein, 1554 aa, synthetic construct
  REGION 1..1554: note = Description of Artificial Sequence: Synthetic polypeptide
MDKKYSIGLAIGTNSVGWAVITDEYKVPSKKFKVLGNTDRHSIKKNLIGALLFDSGETAEATRLKRTARRRYTRRKNRICYLQEIFSNEMAKVDDSFFHRLEESFLVEEDKKHERHPIFGNIVDEVAYHEKYPTIYHLRKKLVDSTDKADLRLIYLALAHMIKFRGHFLIEGDLNPDNSDVDKLFIQLVQTYNQLFEENPINASGVDAKAILSARLSKSRRLENLIAQLPGEKKNGLFGNLIALSLGLTPNFKSNFDLAEDAKLQLSKDTYDDDLDNLLAQIGDQYADLFLAAKNLSDAILLSDILRVNTEITKAPLSASMIKRYDEHHQDLTLLKALVRQQLPEKYKEIFFDQSKNGYAGYIDGGASQEEFYKFIKPILEKMDGTEELLVKLNREDLLRKQRTFDNGSIPHQIHLGELHAILRRQEDFYPFLKDNREKIEKILTFRIPYYVGPLARGNSRFAWMTRKSEETITPWNFEEVVDKGASAQSFIERMTNFDKNLPNEKVLPKHSLLYEYFTVYNELTKVKYVTEGMRKPAFLSGEQKKAIVDLLFKTNRKVTVKQLKEDYFKKIECFDSVEISGVEDRFNASLGTYHDLLKIIKDKDFLDNEENEDILEDIVLTLTLFEDREMIEERLKTYAHLFDDKVMKQLKRRRYTGWGRLSRKLINGIRDKQSGKTILDFLKSDGFANRNFMQLIHDDSLTFKEDIQKAQVSGQGDSLHEHIANLAGSPAIKKGILQTVKVVDELVKVMGRHKPENIVIEMARENQTTQKGQKNSRERMKRIEEGIKELGSQILKEHPVENTQLQNEKLYLYYLQNGRDMYVDQELDINRLSDYDVDHIVPQSFLKDDSIDNKVLTRSDKNRGKSDNVPSEEVVKKMKNYWRQLLNAKLITQRKFDNLTKAERGGLSELDKAGFIKRQLVETRQITKHVAQILDSRMNTKYDENDKLIREVKVITLKSKLVSDFRKDFQFYKVREINNYHHAHDAYLNAVVGTALIKKYPKLESEFVYGDYKVYDVRKMIAKSEGSSGSETPGTSESATPESSGSEVEFSHEYWMRHALTLAKRARDEREVPVGAVLVLNNRVIGEGWNRAIGLHDPTAHAEIMALRQGGLVMQNYRLIDATLYVTFEPCVMCAGAMIHSRIGRVVFGVRNAKTGAAGSLMDVLHYPGMNHRVEITEGILADECAALLCYFFRMPRQVFNAQKKAQSSTDQEIGKATAKYFFYSNIMNFFKTEITLANGEIRKRPLIETNGETGEIVWDKGRDFATVRKVLSMPQVNIVKKTEVQTGGFSKESILPKRNSDKLIARKKDWDPKKYGGFDSPTVAYSVLVVAKVEKGKSKKLKSVKELLGITIMERSSFEKNPIDFLEAKGYKEVKKDLIIKLPKYSLFELENGRKRMLASAGELQKGNELALPSKYVNFLYLASHYEKLKGSPEDNEQKQLFVEQHKHYLDEIIEQISEFSKRVILADANLDKVLSAYNKHRDKPIREQAENIIHLFTLTNLGAPAAFKYFDTTIDRKRYTSTKEVLDATLIHQSITGLYETRIDLSQLGGD

SEQ ID NO: 1323 - protein, 1540 aa, synthetic construct
  REGION 1..1540: note = Description of Artificial Sequence: Synthetic polypeptide
MDKKYSIGLAIGTNSVGWAVITDEYKVPSKKFKVLGNTDRHSIKKNLIGALLFDSGETAEATRLKRTARRRYTRRKNRICYLQEIFSNEMAKVDDSFFHRLEESFLVEEDKKHERHPIFGNIVDEVAYHEKYPTIYHLRKKLVDSTDKADLRLIYLALAHMIKFRGHFLIEGDLNPDNSDVDKLFIQLVQTYNQLFEENPINASGVDAKAILSARLSKSRRLENLIAQLPGEKKNGLFGNLIALSLGLTPNFKSNFDLAEDAKLQLSKDTYDDDLDNLLAQIGDQYADLFLAAKNLSDAILLSDILRVNTEITKAPLSASMIKRYDEHHQDLTLLKALVRQQLPEKYKEIFFDQSKNGYAGYIDGGASQEEFYKFIKPILEKMDGTEELLVKLNREDLLRKQRTFDNGSIPHQIHLGELHAILRRQEDFYPFLKDNREKIEKILTFRIPYYVGPLARGNSRFAWMTRKSEETITPWNFEEVVDKGASAQSFIERMTNFDKNLPNEKVLPKHSLLYEYFTVYNELTKVKYVTEGMRKPAFLSGEQKKAIVDLLFKTNRKVTVKQLKEDYFKKIECFDSVEISGVEDRFNASLGTYHDLLKIIKDKDFLDNEENEDILEDIVLTLTLFEDREMIEERLKTYAHLFDDKVMKQLKRRRYTGWGRLSRKLINGIRDKQSGKTILDFLKSDGFANRNFMQLIHDDSLTFKEDIQKAQVSGQGDSLHEHIANLAGSPAIKKGILQTVKVVDELVKVMGRHKPENIVIEMARENQGSSGSETPGTSESATPESSGSEVEFSHEYWMRHALTLAKRARDEREVPVGAVLVLNNRVIGEGWNRAIGLHDPTAHAEIMALRQGGLVMQNYRLIDATLYVTFEPCVMCAGAMIHSRIGRVVFGVRNAKTGAAGSLMDVLHYPGMNHRVEITEGILADECAALLCYFFRMPRTTQKGQKNSRERMKRIEEGIKELGSQILKEHPVENTQLQNEKLYLYYLQNGRDMYVDQELDINRLSDYDVDHIVPQSFLKDDSIDNKVLTRSDKNRGKSDNVPSEEVVKKMKNYWRQLLNAKLITQRKFDNLTKAERGGLSELDKAGFIKRQLVETRQITKHVAQILDSRMNTKYDENDKLIREVKVITLKSKLVSDFRKDFQFYKVREINNYHHAHDAYLNAVVGTALIKKYPKLESEFVYGDYKVYDVRKMIAKSEQEIGKATAKYFFYSNIMNFFKTEITLANGEIRKRPLIETNGETGEIVWDKGRDFATVRKVLSMPQVNIVKKTEVQTGGFSKESILPKRNSDKLIARKKDWDPKKYGGFDSPTVAYSVLVVAKVEKGKSKKLKSVKELLGITIMERSSFEKNPIDFLEAKGYKEVKKDLIIKLPKYSLFELENGRKRMLASAGELQKGNELALPSKYVNFLYLASHYEKLKGSPEDNEQKQLFVEQHKHYLDEIIEQISEFSKRVILADANLDKVLSAYNKHRDKPIREQAENIIHLFTLTNLGAPAAFKYFDTTIDRKRYTSTKEVLDATLIHQSITGLYETRIDLSQLGGD

SEQ ID NO: 1324 - protein, 1540 aa, synthetic construct
  REGION 1..1540: note = Description of Artificial Sequence: Synthetic polypeptide
MDKKYSIGLAIGTNSVGWAVITDEYKVPSKKFKVLGNTDRHSIKKNLIGALLFDSGETAEATRLKRTARRRYTRRKNRICYLQEIFSNEMAKVDDSFFHRLEESFLVEEDKKHERHPIFGNIVDEVAYHEKYPTIYHLRKKLVDSTDKADLRLIYLALAHMIKFRGHFLIEGDLNPDNSDVDKLFIQLVQTYNQLFEENPINASGVDAKAILSARLSKSRRLENLIAQLPGEKKNGLFGNLIALSLGLTPNFKSNFDLAEDAKLQLSKDTYDDDLDNLLAQIGDQYADLFLAAKNLSDAILLSDILRVNTEITKAPLSASMIKRYDEHHQDLTLLKALVRQQLPEKYKEIFFDQSKNGYAGYIDGGASQEEFYKFIKPILEKMDGTEELLVKLNREDLLRKQRTFDNGSIPHQIHLGELHAILRRQEDFYPFLKDNREKIEKILTFRIPYYVGPLARGNSRFAWMTRKSEETITPWNFEEVVDKGASAQSFIERMTNFDKNLPNEKVLPKHSLLYEYFTVYNELTKVKYVTEGMRKPAFLSGEQKKAIVDLLFKTNRKVTVKQLKEDYFKKIECFDSVEISGVEDRFNASLGTYHDLLKIIKDKDFLDNEENEDILEDIVLTLTLFEDREMIEERLKTYAHLFDDKVMKQLKRRRYTGWGRLSRKLINGIRDKQSGKTILDFLKSDGFANRNFMQLIHDDSLTFKEDIQKAQVSGQGDSLHEHIANLAGSPAIKKGILQTVKVVDELVKVMGRHKPENIVIEMARENQTTQKGQKNSRERMKRIEEGIKELGSQILKEHPVENTQLQNEKLYLYYLQNGRDMYVDQELDINRLSDYDVDHIVPQSFLKDDSIDNKVLTRSDKNRGKSDNVPSEEVVKKMKNYWRQLLNAKLITQRKFDNLTKAERGGLSELDKAGFIKRQLVETRQITKHVAQILDSRMNTKYDENDKLIREVKVITLKSKLVSDFRKDFQFYKVREINNYHHAHDAYLNAVVGTALIKKYPKLESEFVYGDYKVYDVRKMIAKSEQEIGKATAKYFFYSNIMNFFKTEITLANGEIRKRPLIETNGETGEIVWDKGRDFATVRKVLSMPQVNIVKKTEVQTGGFSKESILPKRNSDKLIARKKDWDPKKYGGFDSPTVAYSVLVVAKVEKGKSKKLKSVKELLGITIMERSSFEKNPIDFLEAKGYKEVKKDLIIKLPKYSLFELENGRKRMLASAGELQKGNELALPSKYVNFLYLASHYEKLKGSPGSSGSETPGTSESATPESSGSEVEFSHEYWMRHALTLAKRARDEREVPVGAVLVLNNRVIGEGWNRAIGLHDPTAHAEIMALRQGGLVMQNYRLIDATLYVTFEPCVMCAGAMIHSRIGRVVFGVRNAKTGAAGSLMDVLHYPGMNHRVEITEGILADECAALLCYFFRMPREDNEQKQLFVEQHKHYLDEIIEQISEFSKRVILADANLDKVLSAYNKHRDKPIREQAENIIHLFTLTNLGAPAAFKYFDTTIDRKRYTSTKEVLDATLIHQSITGLYETRIDLSQLGGD

SEQ ID NO: 1325 - protein, 1543 aa, synthetic construct
  REGION 1..1543: note = Description of Artificial Sequence: Synthetic polypeptide
MDKKYSIGLAIGTNSVGWAVITDEYKVPSKKFKVLGNTDRHSIKKNLIGALLFDSGETAEATRLKRTARRRYTRRKNRICYLQEIFSNEMAKVDDSFFHRLEESFLVEEDKKHERHPIFGNIVDEVAYHEKYPTIYHLRKKLVDSTDKADLRLIYLALAHMIKFRGHFLIEGDLNPDNSDVDKLFIQLVQTYNQLFEENPINASGVDAKAILSARLSKSRRLENLIAQLPGEKKNGLFGNLIALSLGLTPNFKSNFDLAEDAKLQLSKDTYDDDLDNLLAQIGDQYADLFLAAKNLSDAILLSDILRVNTEITKAPLSASMIKRYDEHHQDLTLLKALVRQQLPEKYKEIFFDQSKNGYAGYIDGGASQEEFYKFIKPILEKMDGTEELLVKLNREDLLRKQRTFDNGSIPHQIHLGELHAILRRQEDFYPFLKDNREKIEKILTFRIPYYVGPLARGNSRFAWMTRKSEETITPWNFEEVVDKGASAQSFIERMTNFDKNLPNEKVLPKHSLLYEYFTVYNELTKVKYVTEGMRKPAFLSGEQKKAIVDLLFKTNRKVTVKQLKEDYFKKIECFDSVEISGVEDRFNASLGTYHDLLKIIKDKDFLDNEENEDILEDIVLTLTLFEDREMIEERLKTYAHLFDDKVMKQLKRRRYTGWGRLSRKLINGIRDKQSGKTILDFLKSDGFANRNFMQLIHDDSLTFKEDIQKAQVSGQGDSLHEHIANLAGSPAIKKGILQTVKVVDELVKVMGRHKPENIVIEMARENQTTQKGQKNSRERMKRIEEGIKELGSQILKEHPVENTQLQNEKLYLYYLQNGRDMYVDQELDINRLSDYDVDHIVPQSFLKDDSIDNKVLTRSDKNRGKSDNVPSEEVVKKMKNYWRQLLNAKLITQRKFDNLTKAERGGLSELDKAGFIKRQLVETRQITKHVAQILDSRMNTKYDENDKLIREVKVITLKSKLVSDFRKDFQFYKVREINNYHHAHDAYLNAVVGTALIKKYPKLESEFVYGDYKVYDVRKMIAKSEQEIGKATAKYFFYSNIMNFFKTEITLANGEIRKRPLIETNGETGEIVWDKGRDFATVRKVLSMPQVNIVKKTEVQTGGFSKESILPKRNSDKLIARKKDWDPKKYGGFDSPTVAYSVLVVAKVEKGKSKKLKSVKELLGITIMERSSFEKNPIDFLEAKGYKEVKKDLIIKLPKYSLFELENGRKRMLASAGELQKGNELALPSKYVNFLYLASHYEKLKGSPGSSGSSGSETPGTSESATPESSGSEVEFSHEYWMRHALTLAKRARDEREVPVGAVLVLNNRVIGEGWNRAIGLHDPTAHAEIMALRQGGLVMQNYRLIDATLYVTFEPCVMCAGAMIHSRIGRVVFGVRNAKTGAAGSLMDVLHYPGMNHRVEITEGILADECAALLCYFFRMPREDNEQKQLFVEQHKHYLDEIIEQISEFSKRVILADANLDKVLSAYNKHRDKPIREQAENIIHLFTLTNLGAPAAFKYFDTTIDRKRYTSTKEVLDATLIHQSITGLYETRIDLSQLGGD

SEQ ID NO: 1326 - protein, 1546 aa, synthetic construct
  REGION 1..1546: note = Description of Artificial Sequence: Synthetic polypeptide
MDKKYSIGLAIGTNSVGWAVITDEYKVPSKKFKVLGNTDRHSIKKNLIGALLFDSGETAEATRLKRTARRRYTRRKNRICYLQEIFSNEMAKVDDSFFHRLEESFLVEEDKKHERHPIFGNIVDEVAYHEKYPTIYHLRKKLVDSTDKADLRLIYLALAHMIKFRGHFLIEGDLNPDNSDVDKLFIQLVQTYNQLFEENPINASGVDAKAILSARLSKSRRLENLIAQLPGEKKNGLFGNLIALSLGLTPNFKSNFDLAEDAKLQLSKDTYDDDLDNLLAQIGDQYADLFLAAKNLSDAILLSDILRVNTEITKAPLSASMIKRYDEHHQDLTLLKALVRQQLPEKYKEIFFDQSKNGYAGYIDGGASQEEFYKFIKPILEKMDGTEELLVKLNREDLLRKQRTFDNGSIPHQIHLGELHAILRRQEDFYPFLKDNREKIEKILTFRIPYYVGPLARGNSRFAWMTRKSEETITPWNFEEVVDKGASAQSFIERMTNFDKNLPNEKVLPKHSLLYEYFTVYNELTKVKYVTEGMRKPAFLSGEQKKAIVDLLFKTNRKVTVKQLKEDYFKKIECFDSVEISGVEDRFNASLGTYHDLLKIIKDKDFLDNEENEDILEDIVLTLTLFEDREMIEERLKTYAHLFDDKVMKQLKRRRYTGWGRLSRKLINGIRDKQSGKTILDFLKSDGFANRNFMQLIHDDSLTFKEDIQKAQVSGQGDSLHEHIANLAGSPAIKKGILQTVKVVDELVKVMGRHKPENIVIEMARENQTTQKGQKNSRERMKRIEEGIKELGSQILKEHPVENTQLQNEKLYLYYLQNGRDMYVDQELDINRLSDYDVDHIVPQSFLKDDSIDNKVLTRSDKNRGKSDNVPSEEVVKKMKNYWRQLLNAKLITQRKFDNLTKAERGGLSELDKAGFIKRQLVETRQITKHVAQILDSRMNTKYDENDKLIREVKVITLKSKLVSDFRKDFQFYKVREINNYHHAHDAYLNAVVGTALIKKYPKLESEFVYGDYKVYDVRKMIAKSEQEIGKATAKYFFYSNIMNFFKTEITLANGEIRKRPLIETNGETGEIVWDKGRDFATVRKVLSMPQVNIVKKTEVQTGGFSKESILPKRNSDKLIARKKDWDPKKYGGFDSPTVAYSVLVVAKVEKGKSKKLKSVKELLGITIMERSSFEKNPIDFLEAKGYKEVKKDLIIKLPKYSLFELENGRKRMLASAGELQKGNELALPSKYVNFLYLASHYEKLKGSPGSSGSSGSETPGTSESATPESGSSSGSEVEFSHEYWMRHALTLAKRARDEREVPVGAVLVLNNRVIGEGWNRAIGLHDPTAHAEIMALRQGGLVMQNYRLIDATLYVTFEPCVMCAGAMIHSRIGRVVFGVRNAKTGAAGSLMDVLHYPGMNHRVEITEGILADECAALLCYFFRMPREDNEQKQLFVEQHKHYLDEIIEQISEFSKRVILADANLDKVLSAYNKHRDKPIREQAENIIHLFTLTNLGAPAAFKYFDTTIDRKRYTSTKEVLDATLIHQSITGLYETRIDLSQLGGD

SEQ ID NO: 1327 - protein, 1546 aa, synthetic construct
  REGION 1..1546: note = Description of Artificial Sequence: Synthetic polypeptide
MDKKYSIGLAIGTNSVGWAVITDEYKVPSKKFKVLGNTDRHSIKKNLIGALLFDSGETAEATRLKRTARRRYTRRKNRICYLQEIFSNEMAKVDDSFFHRLEESFLVEEDKKHERHPIFGNIVDEVAYHEKYPTIYHLRKKLVDSTDKADLRLIYLALAHMIKFRGHFLIEGDLNPDNSDVDKLFIQLVQTYNQLFEENPINASGVDAKAILSARLSKSRRLENLIAQLPGEKKNGLFGNLIALSLGLTPNFKSNFDLAEDAKLQLSKDTYDDDLDNLLAQIGDQYADLFLAAKNLSDAILLSDILRVNTEITKAPLSASMIKRYDEHHQDLTLLKALVRQQLPEKYKEIFFDQSKNGYAGYIDGGASQEEFYKFIKPILEKMDGTEELLVKLNREDLLRKQRTFDNGSIPHQIHLGELHAILRRQEDFYPFLKDNREKIEKILTFRIPYYVGPLARGNSRFAWMTRKSEETITPWNFEEVVDKGASAQSFIERMTNFDKNLPNEKVLPKHSLLYEYFTVYNELTKVKYVTEGMRKPAFLSGEQKKAIVDLLFKTNRKVTVKQLKEDYFKKIECFDSVEISGVEDRFNASLGTYHDLLKIIKDKDFLDNEENEDILEDIVLTLTLFEDREMIEERLKTYAHLFDDKVMKQLKRRRYTGWGRLSRKLINGIRDKQSGKTILDFLKSDGFANRNFMQLIHDDSLTFKEDIQKAQVSGQGDSLHEHIANLAGSPAIKKGILQTVKVVDELVKVMGRHKPENIVIEMARENQTTQKGQKNSRERMKRIEEGIKELGSQILKEHPVENTQLQNEKLYLYYLQNGRDMYVDQELDINRLSDYDVDHIVPQSFLKDDSIDNKVLTRSDKNRGKSDNVPSEEVVKKMKNYWRQLLNAKLITQRKFDNLTKAERGGLSELDKAGFIKRQLVETRQITKHVAQILDSRMNTKYDENDKLIREVKVITLKSKLVSDFRKDFQFYKVREINNYHHAHDAYLNAVVGTALIKKYPKLESEFVYGDYKVYDVRKMIAKSEQEIGKATAKYFFYSNIMNFFKTEITLANGEIRKRPLIETNGETGEIVWDKGRDFATVRKVLSMPQVNIVKKTEVQTGGFSKESILPKRNSDKLIARKKDWDPKKYGGFDSPTVAYSVLVVAKVEKGKSKKLKSVKELLGITIMERSSFEKNPIDFLEAKGYKEVKKDLIIKLPKYSLFELENGRKRMLASAGELQKGNELALPSKYVNFLYLASHYEKLKGSPGSSGSSGSETPGTSESATPESGSSSGSEVEFSHEYWMRHALTLAKRARDEREVPVGAVLVLNNRVIGEGWNRAIGLHDPTAHAEIMALRQGGLVMQNYRLIDATLYVTFEPCVMCAGAMIHSRIGRVVFGVRNAKTGAAGSLMDVLHYPGMNHRVEITEGILADECAALLCYFFRMRREDNEQKQLFVEQHKHYLDEIIEQISEFSKRVILADANLDKVLSAYNKHRDKPIREQAENIIHLFTLTNLGAPAAFKYFDTTIDRKRYTSTKEVLDATLIHQSITGLYETRIDLSQLGGD

SEQ ID NO: 1328 - protein, 1546 aa, synthetic construct
  REGION 1..1546: note = Description of Artificial Sequence: Synthetic polypeptide
MDKKYSIGLAIGTNSVGWAVITDEYKVPSKKFKVLGNTDRHSIKKNLIGALLFDSGETAEATRLKRTARRRYTRRKNRICYLQEIFSNEMAKVDDSFFHRLEESFLVEEDKKHERHPIFGNIVDEVAYHEKYPTIYHLRKKLVDSTDKADLRLIYLALAHMIKFRGHFLIEGDLNPDNSDVDKLFIQLVQTYNQLFEENPINASGVDAKAILSARLSKSRRLENLIAQLPGEKKNGLFGNLIALSLGLTPNFKSNFDLAEDAKLQLSKDTYDDDLDNLLAQIGDQYADLFLAAKNLSDAILLSDILRVNTEITKAPLSASMIKRYDEHHQDLTLLKALVRQQLPEKYKEIFFDQSKNGYAGYIDGGASQEEFYKFIKPILEKMDGTEELLVKLNREDLLRKQRTFDNGSIPHQIHLGELHAILRRQEDFYPFLKDNREKIEKILTFRIPYYVGPLARGNSRFAWMTRKSEETITPWNFEEVVDKGASAQSFIERMTNFDKNLPNEKVLPKHSLLYEYFTVYNELTKVKYVTEGMRKPAFLSGEQKKAIVDLLFKTNRKVTVKQLKEDYFKKIECFDSVEISGVEDRFNASLGTYHDLLKIIKDKDFLDNEENEDILEDIVLTLTLFEDREMIEERLKTYAHLFDDKVMKQLKRRRYTGWGRLSRKLINGIRDKQSGKTILDFLKSDGFANRNFMQLIHDDSLTFKEDIQKAQVSGQGDSLHEHIANLAGSPAIKKGILQTVKVVDELVKVMGRHKPENIVIEMARENQTTQKGQKNSRERMKRIEEGIKELGSQILKEHPVENTQLQNEKLYLYYLQNGRDMYVDQELDINRLSDYDVDHIVPQSFLKDDSIDNKVLTRSDKNRGKSDNVPSEEVVKKMKNYWRQLLNAKLITQRKFDNLTKAERGGLSELDKAGFIKRQLVETRQITKHVAQILDSRMNTKYDENDKLIREVKVITLKSKLVSDFRKDFQFYKVREINNYHHAHDAYLNAVVGTALIKKYPKLESEFVYGDYKVYDVRKMIAKSEQEIGKATAKYFFYSNIMNFFKTEITLANGEIRKRPLIETNGETGEIVWDKGRDFATVRKVLSMPQVNIVKKTEVQTGGFSKESILPKRNSDKLIARKKDWDPKKYGGFDSPTVAYSVLVVAKVEKGKSKKLKSVKELLGITIMERSSFEKNPIDFLEAKGYKEVKKDLIIKLPKYSLFELENGRKRMLASAGELQKGNELALPSKYVNFLYLASHYEKLKGSGSSGSSGSETPGTSESATPESGSSSGSEVEFSHEYWMRHALTLAKRARDEREVPVGAVLVLNNRVIGEGWNRAIGLHDPTAHAEIMALRQGGLVMQNYRLIDATLYVTFEPCVMCAGAMIHSRIGRVVFGVRNAKTGAAGSLMDVLHYPGMNHRVEITEGILADECAALLCYFFRMRRPEDNEQKQLFVEQHKHYLDEIIEQISEFSKRVILADANLDKVLSAYNKHRDKPIREQAENIIHLFTLTNLGAPAAFKYFDTTIDRKRYTSTKEVLDATLIHQSITGLYETRIDLSQLGGD

SEQ ID NO: 1329 - protein, 1551 aa, synthetic construct
  REGION 1..1551: note = Description of Artificial Sequence: Synthetic polypeptide
MDKKYSIGLAIGTNSVGWAVITDEYKVPSKKFKVLGNTDRHSIKKNLIGALLFDSGETAEATRLKRTARRRYTRRKNRICYLQEIFSNEMAKVDDSFFHRLEESFLVEEDKKHERHPIFGNIVDEVAYHEKYPTIYHLRKKLVDSTDKADLRLIYLALAHMIKFRGHFLIEGDLNPDNSDVDKLFIQLVQTYNQLFEENPINASGVDAKAILSARLSKSRRLENLIAQLPGEKKNGLFGNLIALSLGLTPNFKSNFDLAEDAKLQLSKDTYDDDLDNLLAQIGDQYADLFLAAKNLSDAILLSDILRVNTEITKAPLSASMIKRYDEHHQDLTLLKALVRQQLPEKYKEIFFDQSKNGYAGYIDGGASQEEFYKFIKPILEKMDGTEELLVKLNREDLLRKQRTFDNGSIPHQIHLGELHAILRRQEDFYPFLKDNREKIEKILTFRIPYYVGPLARGNSRFAWMTRKSEETITPWNFEEVVDKGASAQSFIERMTNFDKNLPNEKVLPKHSLLYEYFTVYNELTKVKYVTEGMRKPAFLSGEQKKAIVDLLFKTNRKVTVKQLKEDYFKKIECFDSVEISGVEDRFNASLGTYHDLLKIIKDKDFLDNEENEDILEDIVLTLTLFEDREMIEERLKTYAHLFDDKVMKQLKRRRYTGWGRLSRKLINGIRDKQSGKTILDFLKSDGFANRNFMQLIHDDSLTFKEDIQKAQVSGQGDSLHEHIANLAGSPAIKKGILQTVKVVDELVKVMGRHKPENIVIEMARENQTTQKGQKNSRERMKRIEEGIKELGSQILKEHPVENTQLQNEKLYLYYLQNGRDMYVDQELDINRLSDYDVDHIVPQSFLKDDSIDNKVLTRSDKNRGKSDNVPSEEVVKKMKNYWRQLLNAKLITQRKFDNLTKAERGGLSELDKAGFIKRQLVETRQITKHVAQILDSRMNTKYDENDKLIREVKVITLKSKLVSDFRKDFQFYKVREINNYHHAHDAYLNAVVGTALIKKYPKLESEFVYGDYKVYDVRKMIAKSEQEIGKATAKYFFYSNIMNFFKTEITLANGEIRKRPLIETNGETGEIVWDKGRDFATVRKVLSMPQVNIVKKTEVQTGGFSKESILPKRNSDKLIARKKDWDPKKYGGFDSPTVAYSVLVVAKVEKGKSKKLKSVKELLGITIMERSSFEKNPIDFLEAKGYKEVKKDLIIKLPKYSLFELENGRKRMLASAGELQKGNELALPSKYVNFLYLASHYEKLKGSPGSSGSSGSETPGTSESATPESGSSGSEVEFSHEYWMRHALTLAKRARDEREVPVGAVLVLNNRVIGEGWNRAHAEIMALRQGGLVMQNYRLIDATLYVTFEPCVMCAGAMIHSRIGRVVFGVRNAKTGAAGSLMDVLHYPGMNHRVEITEGILADECAALLCYFFRMPRQVFNAQKKAQSSTDEDNEQKQLFVEQHKHYLDEIIEQISEFSKRVILADANLDKVLSAYNKHRDKPIREQAENIIHLFTLTNLGAPAAFKYFDTTIDRKRYTSTKEVLDATLIHQSITGLYETRIDLSQLGGD

SEQ ID NO: 1330 - protein, 1546 aa, synthetic construct
  REGION 1..1546: note = Description of Artificial Sequence: Synthetic polypeptide
MDKKYSIGLAIGTNSVGWAVITDEYKVPSKKFKVLGNTDRHSIKKNLIGALLFDSGETAEATRLKRTARRRYTRRKNRICYLQEIFSNEMAKVDDSFFHRLEESFLVEEDKKHERHPIFGNIVDEVAYHEKYPTIYHLRKKLVDSTDKADLRLIYLALAHMIKFRGHFLIEGDLNPDNSDVDKLFIQLVQTYNQLFEENPINASGVDAKAILSARLSKSRRLENLIAQLPGEKKNGLFGNLIALSLGLTPNFKSNFDLAEDAKLQLSKDTYDDDLDNLLAQIGDQYADLFLAAKNLSDAILLSDILRVNTEITKAPLSASMIKRYDEHHQDLTLLKALVRQQLPEKYKEIFFDQSKNGYAGYIDGGASQEEFYKFIKPILEKMDGTEELLVKLNREDLLRKQRTFDNGSIPHQIHLGELHAILRRQEDFYPFLKDNREKIEKILTFRIPYYVGPLARGNSRFAWMTRKSEETITPWNFEEVVDKGASAQSFIERMTNFDKNLPNEKVLPKHSLLYEYFTVYNELTKVKYVTEGMRKPAFLSGEQKKAIVDLLFKTNRKVTVKQLKEDYFKKIECFDSVEISGVEDRFNASLGTYHDLLKIIKDKDFLDNEENEDILEDIVLTLTLFEDREMIEERLKTYAHLFDDKVMKQLKRRRYTGWGRLSRKLINGIRDKQSGKTILDFLKSDGFANRNFMQLIHDDSLTFKEDIQKAQVSGQGDSLHEHIANLAGSPAIKKGILQTVKVVDELVKVMGRHKPENIVIEMARENQTTQKGQKNSRERMKRIEEGIKELGSQILKEHPVENTQLQNEKLYLYYLQNGRDMYVDQELDINRLSDYDVDHIVPQSFLKDDSIDNKVLTRSDKNRGKSDNVPSEEVVKKMKNYWRQLLNAKLITQRKFDNLTKAERGGLSELDKAGFIKRQLVETRQITKHVAQILDSRMNTKYDENDKLIREVKVITLKSKLVSDFRKDFQFYKVREINNYHHAHDAYLNAVVGTALIKKYPKLESEFVYGDYKVYDVRKMIAKSEQEIGKATAKYFFYSNIMNFFKTEITLANGEIRKRPLIETNGETGEIVWDKGRDFATVRKVLSMPQVNIVKKTEVQTGGFSKESILPKRNSDKLIARKKDWDPKKYGGFDSPTVAYSVLVVAKVEKGKSKKLKSVKELLGITIMERSSFEKNPIDFLEAKGYKEVKKDLIIKLPKYSLFELENGRKRMLASAGELQKGNELALPSKYVNFLYLASHYEKLKGSPEGSSGSSGSETPGTSESATPESGSSSGSEVEFSHEYWMRHALTLAKRARDEREVPVGAVLVLNNRVIGEGWNRAIGLHDPTAHAEIMALRQGGLVMQNYRLIDATLYVTFEPCVMCAGAMIHSRIGRVVFGVRNAKTGAAGSLMDVLHYPGMNHRVEITEGILADECAALLCYFFRMRRDNEQKQLFVEQHKHYLDEIIEQISEFSKRVILADANLDKVLSAYNKHRDKPIREQAENIIHLFTLTNLGAPAAFKYFDTTIDRKRYTSTKEVLDATLIHQSITGLYETRIDLSQLGGD

SEQ ID NO: 1331 - protein, 1546 aa, synthetic construct
  REGION 1..1546: note = Description of Artificial Sequence: Synthetic polypeptide
MDKKYSIGLAIGTNSVGWAVITDEYKVPSKKFKVLGNTDRHSIKKNLIGALLFDSGETAEATRLKRTARRRYTRRKNRICYLQEIFSNEMAKVDDSFFHRLEESFLVEEDKKHERHPIFGNIVDEVAYHEKYPTIYHLRKKLVDSTDKADLRLIYLALAHMIKFRGHFLIEGDLNPDNSDVDKLFIQLVQTYNQLFEENPINASGVDAKAILSARLSKSRRLENLIAQLPGEKKNGLFGNLIALSLGLTPNFKSNFDLAEDAKLQLSKDTYDDDLDNLLAQIGDQYADLFLAAKNLSDAILLSDILRVNTEITKAPLSASMIKRYDEHHQDLTLLKALVRQQLPEKYKEIFFDQSKNGYAGYIDGGASQEEFYKFIKPILEKMDGTEELLVKLNREDLLRKQRTFDNGSIPHQIHLGELHAILRRQEDFYPFLKDNREKIEKILTFRIPYYVGPLARGNSRFAWMTRKSEETITPWNFEEVVDKGASAQSFIERMTNFDKNLPNEKVLPKHSLLYEYFTVYNELTKVKYVTEGMRKPAFLSGEQKKAIVDLLFKTNRKVTVKQLKEDYFKKIECFDSVEISGVEDRFNASLGTYHDLLKIIKDKDFLDNEENEDILEDIVLTLTLFEDREMIEERLKTYAHLFDDKVMKQLKRRRYTGWGRLSRKLINGIRDKQSGKTILDFLKSDGFANRNFMQLIHDDSLTFKEDIQKAQVSGQGDSLHEHIANLAGSPAIKKGILQTVKVVDELVKVMGRHKPENIVIEMARENQTTQKGQKNSRERMKRIEEGIKELGSQILKEHPVENTQLQNEKLYLYYLQNGRDMYVDQELDINRLSDYDVDHIVPQSFLKDDSIDNKVLTRSDKNRGKSDNVPSEEVVKKMKNYWRQLLNAKLITQRKFDNLTKAERGGLSELDKAGFIKRQLVETRQITKHVAQILDSRMNTKYDENDKLIREVKVITLKSKLVSDFRKDFQFYKVREINNYHHAHDAYLNAVVGTALIKKYPKLESEFVYGDYKVYDVRKMIAKSEQEIGKATAKYFFYSNIMNFFKTEITLANGEIRKRPLIETNGETGEIVWDKGRDFATVRKVLSMPQVNIVKKTEVQTGGFSKESILPKRNSDKLIARKKDWDPKKYGGFDSPTVAYSVLVVAKVEKGKSKKLKSVKELLGITIMERSSFEKNPIDFLEAKGYKEVKKDLIIKLPKYSLFELENGRKRMLASAGELQKGNELALPSKYVNFLYLASHYEKLKGSPEDGSSGSSGSETPGTSESATPESGSSSGSEVEFSHEYWMRHALTLAKRARDEREVPVGAVLVLNNRVIGEGWNRAIGLHDPTAHAEIMALRQGGLVMQNYRLIDATLYVTFEPCVMCAGAMIHSRIGRVVFGVRNAKTGAAGSLMDVLHYPGMNHRVEITEGILADECAALLCYFFRMRRNEQKQLFVEQHKHYLDEIIEQISEFSKRVILADANLDKVLSAYNKHRDKPIREQAENIIHLFTLTNLGAPAAFKYFDTTIDRKRYTSTKEVLDATLIHQSITGLYETRIDLSQLGGD

SEQ ID NO: 1332 - protein, 1533 aa, synthetic construct
  REGION 1..1533: note = Description of Artificial Sequence: Synthetic polypeptide
MDKKYSIGLAIGTNSVGWAVITDEYKVPSKKFKVLGNTDRHSIKKNLIGALLFDSGETAEATRLKRTARRRYTRRKNRICYLQEIFSNEMAKVDDSFFHRLEESFLVEEDKKHERHPIFGNIVDEVAYHEKYPTIYHLRKKLVDSTDKADLRLIYLALAHMIKFRGHFLIEGDLNPDNSDVDKLFIQLVQTYNQLFEENPINASGVDAKAILSARLSKSRRLENLIAQLPGEKKNGLFGNLIALSLGLTPNFKSNFDLAEDAKLQLSKDTYDDDLDNLLAQIGDQYADLFLAAKNLSDAILLSDILRVNTEITKAPLSASMIKRYDEHHQDLTLLKALVRQQLPEKYKEIFFDQSKNGYAGYIDGGASQEEFYKFIKPILEKMDGTEELLVKLNREDLLRKQRTFDNGSIPHQIHLGELHAILRRQEDFYPFLKDNREKIEKILTFRIPYYVGPLARGNSRFAWMTRKSEETITPWNFEEVVDKGASAQSFIERMTNFDKNLPNEKVLPKHSLLYEYFTVYNELTKVKYVTEGMRKPAFLSGEQKKAIVDLLFKTNRKVTVKQLKEDYFKKIECFDSVEISGVEDRFNASLGTYHDLLKIIKDKDFLDNEENEDILEDIVLTLTLFEDREMIEERLKTYAHLFDDKVMKQLKRRRYTGWGRLSRKLINGIRDKQSGKTILDFLKSDGFANRNFMQLIHDDSLTFKEDIQKAQVSGQGDSLHEHIANLAGSPAIKKGILQTVKVVDELVKVMGRHKPENIVIEMARENQTTQKGQKNSRERMKRIEEGIKELGSQILKEHPVENTQLQNEKLYLYYLQNGRDMYVDQELDINRLSDYDVDHIVPQSFLKDDSIDNKVLTRSDKNRGKSDNVPSEEVVKKMKNYWRQLLNAKLITQRKFDNLTKAERGGLSELDKAGFIKRQLVETRQITKHVAQILDSRMNTKYDENDKLIREVKVITLKSKLVSDFRKDFQFYKVREINNYHHAHDAYLNAVVGTALIKKYPKLESEFVYGDYKVYDVRKMIAKSEQEIGKATAKYFFYSNIMNFFKTEITLANGEIRKRPLIETNGETGEIVWDKGRDFATVRKVLSMPQVNIVKKTEVQTGGFSKESILPKRNSDKLIARKKDWDPKKYGGFDSPTVAYSVLVVAKVEKGKSKKLKSVKELLGITIMERSSFEKNPIDFLEAKGYKEVKKDLIIKLPKYSLFELENGRKRMLASAGELQKGNELALPSKYVNFLYLASHYEKLKGSPGSSGSETPGTSESATPESSGSEVEFSHEYWMRHALTLAKRARDEREVPVGAVLVLNNRVIGEGWNRAHAEIMALRQGGLVMQNYRLIDATLYVTFEPCVMCAGAMIHSRIGRVVFGVRNAKTGAAGSLMDVLHYPGMNHRVEITEGILADECAALLCYFFRMPRQEDNEQKQLFVEQHKHYLDEIIEQISEFSKRVILADANLDKVLSAYNKHRDKPIREQAENIIHLFTLTNLGAPAAFKYFDTTIDRKRYTSTKEVLDATLIHQSITGLYETRIDLSQLGGD

SEQ ID NO: 1333 - protein, 1549 aa, synthetic construct
  REGION 1..1549: note = Description of Artificial Sequence: Synthetic polypeptide
MDKKYSIGLAIGTNSVGWAVITDEYKVPSKKFKVLGNTDRHSIKKNLIGALLFDSGETAEATRLKRTARRRYTRRKNRICYLQEIFSNEMAKVDDSFFHRLEESFLVEEDKKHERHPIFGNIVDEVAYHEKYPTIYHLRKKLVDSTDKADLRLIYLALAHMIKFRGHFLIEGDLNPDNSDVDKLFIQLVQTYNQLFEENPINASGVDAKAILSARLSKSRRLENLIAQLPGEKKNGLFGNLIALSLGLTPNFKSNFDLAEDAKLQLSKDTYDDDLDNLLAQIGDQYADLFLAAKNLSDAILLSDILRVNTEITKAPLSASMIKRYDEHHQDLTLLKALVRQQLPEKYKEIFFDQSKNGYAGYIDGGASQEEFYKFIKPILEKMDGTEELLVKLNREDLLRKQRTFDNGSIPHQIHLGELHAILRRQEDFYPFLKDNREKIEKILTFRIPYYVGPLARGNSRFAWMTRKSEETITPWNFEEVVDKGASAQSFIERMTNFDKNLPNEKVLPKHSLLYEYFTVYNELTKVKYVTEGMRKPAFLSGEQKKAIVDLLFKTNRKVTVKQLKEDYFKKIECFDSVEISGVEDRFNASLGTYHDLLKIIKDKDFLDNEENEDILEDIVLTLTLFEDREMIEERLKTYAHLFDDKVMKQLKRRRYTGWGRLSRKLINGIRDKQSGKTILDFLKSDGFANRNFMQLIHDDSLTFKEDIQKAQVSGQGDSLHEHIANLAGSPAIKKGILQTVKVVDELVKVMGRHKPENIVIEMARENQTTQKGQKNSRERMKRIEEGIKELGSQILKEHPVENTQLQNEKLYLYYLQNGRDMYVDQELDINRLSDYDVDHIVPQSFLKDDSIDNKVLTRSDKNRGKSDNVPSEEVVKKMKNYWRQLLNAKLITQRKFDNLTKAERGGLSELDKAGFIKRQLVETRQITKHVAQILDSRMNTKYDENDKLIREVKVITLKSKLVSDFRKDFQFYKVREINNYHHAHDAYLNAVVGTALSHEYWMRHALTLAKRARDEREVPVGAVLVLNNRVIGEGWNRAIGLHDPTAHAEIMALRQGGLVMQNYRLIDATLYVTFEPCVMCAGAMIHSRIGRVVFGVRNAKTGAAGSLMDVLHYPGMNHRVEITEGILADECAALLCYFFRMPRQVFNAQKKAQSSTDGSSGSETPGTSESATPESSGIKKYPKLESEFVYGDYKVYDVRKMIAKSEQEIGKATAKYFFYSNIMNFFKTEITLANGEIRKRPLIETNGETGEIVWDKGRDFATVRKVLSMPQVNIVKKTEVQTGGFSKESILPKRNSDKLIARKKDWDPKKYGGFDSPTVAYSVLVVAKVEKGKSKKLKSVKELLGITIMERSSFEKNPIDFLEAKGYKEVKKDLIIKLPKYSLFELENGRKRMLASAGELQKGNELALPSKYVNFLYLASHYEKLKGSPEDNEQKQLFVEQHKHYLDEIIEQISEFSKRVILADANLDKVLSAYNKHRDKPIREQAENIIHLFTLTNLGAPAAFKYFDTTIDRKRYTSTKEVLDATLIHQSITGLYETRIDLSQLGGD

SEQ ID NO: 1334 - protein, 1555 aa, synthetic construct
  REGION 1..1555: note = Description of Artificial Sequence: Synthetic polypeptide
MDKKYSIGLAIGTNSVGWAVITDEYKVPSKKFKVLGNTDRHSIKKNLIGALLFDSGETAEATRLKRTARRRYTRRKNRICYLQEIFSNEMAKVDDSFFHRLEESFLVEEDKKHERHPIFGNIVDEVAYHEKYPTIYHLRKKLVDSTDKADLRLIYLALAHMIKFRGHFLIEGDLNPDNSDVDKLFIQLVQTYNQLFEENPINASGVDAKAILSARLSKSRRLENLIAQLPGEKKNGLFGNLIALSLGLTPNFKSNFDLAEDAKLQLSKDTYDDDLDNLLAQIGDQYADLFLAAKNLSDAILLSDILRVNTEITKAPLSASMIKRYDEHHQDLTLLKALVRQQLPEKYKEIFFDQSKNGYAGYIDGGASQEEFYKFIKPILEKMDGTEELLVKLNREDLLRKQRTFDNGSIPHQIHLGELHAILRRQEDFYPFLKDNREKIEKILTFRIPYYVGPLARGNSRFAWMTRKSEETITPWNFEEVVDKGASAQSFIERMTNFDKNLPNEKVLPKHSLLYEYFTVYNELTKVKYVTEGMRKPAFLSGEQKKAIVDLLFKTNRKVTVKQLKEDYFKKIECFDSVEISGVEDRFNASLGTYHDLLKIIKDKDFLDNEENEDILEDIVLTLTLFEDREMIEERLKTYAHLFDDKVMKQLKRRRYTGWGRLSRKLINGIRDKQSGKTILDFLKSDGFANRNFMQLIHDDSLTFKEDIQKAQVSGQGDSLHEHIANLAGSPAIKKGILQTVKVVDELVKVMGRHKPENIVIEMARENQTTQKGQKNSRERMKRIEEGIKELGSQILKEHPVENTQLQNEKLYLYYLQNGRDMYVDQELDINRLSDYDVDHIVPQSFLKDDSIDNKVLTRSDKNRGKSDNVPSEEVVKKMKNYWRQLLNAKLITQRKFDNLTKAERGGLSELDKAGFIKRQLVETRQITKHVAQILDSRMNTKYDENDKLIREVKVITLKSKLVSDFRKDFQFYKVREINNYHHAHDAYLNAVVGTALSHEYWMRHALTLAKRARDEREVPVGAVLVLNNRVIGEGWNRAIGLHDPTAHAEIMALRQGGLVMQNYRLIDATLYVTFEPCVMCAGAMIHSRIGRVVFGVRNAKTGAAGSLMDVLHYPGMNHRVEITEGILADECAALLCYFFRMPRQVFNAQKKAQSSTDGSSGSSGSETPGTSESATPESSGGSSIKKYPKLESEFVYGDYKVYDVRKMIAKSEQEIGKATAKYFFYSNIMNFFKTEITLANGEIRKRPLIETNGETGEIVWDKGRDFATVRKVLSMPQVNIVKKTEVQTGGFSKESILPKRNSDKLIARKKDWDPKKYGGFDSPTVAYSVLVVAKVEKGKSKKLKSVKELLGITIMERSSFEKNPIDFLEAKGYKEVKKDLIIKLPKYSLFELENGRKRMLASAGELQKGNELALPSKYVNFLYLASHYEKLKGSPEDNEQKQLFVEQHKHYLDEIIEQISEFSKRVILADANLDKVLSAYNKHRDKPIREQAENIIHLFTLTNLGAPAAFKYFDTTIDRKRYTSTKEVLDATLIHQSITGLYETRIDLSQLGGD

SEQ ID NO: 1335 - protein, 1421 aa, synthetic construct
  REGION 1..1421: note = Description of Artificial Sequence: Synthetic polypeptide
MDKKYSIGLAIGTNSVGWAVITDEYKVPSKKFKVLGNTDRHSIKKNLIGALLFDSGETAEATRLKRTARRRYTRRKNRICYLQEIFSNEMAKVDDSFFHRLEESFLVEEDKKHERHPIFGNIVDEVAYHEKYPTIYHLRKKLVDSTDKADLRLIYLALAHMIKFRGHFLIEGDLNPDNSDVDKLFIQLVQTYNQLFEENPINASGVDAKAILSARLSKSRRLENLIAQLPGEKKNGLFGNLIALSLGLTPNFKSNFDLAEDAKLQLSKDTYDDDLDNLLAQIGDQYADLFLAAKNLSDAILLSDILRVNTEITKAPLSASMIKRYDEHHQDLTLLKALVRQQLPEKYKEIFFDQSKNGYAGYIDGGASQEEFYKFIKPILEKMDGTEELLVKLNREDLLRKQRTFDNGSIPHQIHLGELHAILRRQEDFYPFLKDNREKIEKILTFRIPYYVGPLARGNSRFAWMTRKSEETITPWNFEEVVDKGASAQSFIERMTNFDKNLPNEKVLPKHSLLYEYFTVYNELTKVKYVTEGMRKPAFLSGEQKKAIVDLLFKTNRKVTVKQLKEDYFKKIECFDSVEISGVEDRFNASLGTYHDLLKIIKDKDFLDNEENEDILEDIVLTLTLFEDREMIEERLKTYAHLFDDKVMKQLKRRRYTGWGRLSRKLINGIRDKQSGKTILDFLKSDGFANRNFMQLIHDDSLTFKEDIQKAQVSGQGDSLHEHIANLAGSPAIKKGILQTVKVVDELVKVMGRHKPENIVIEMARENQTTQKGQKNSRERMKRIEEGIKELGSEVEFSHEYWMRHALTLAKRARDEREVPVGAVLVLNNRVIGEGWNRAIGLHDPTAHAEIMALRQGGLVMQNYRLIDATLYVTFEPCVMCAGAMIHSRIGRVVFGVRNAKTGAAGSLMDVLHYPGMNHRVEITEGILADECAALLCYFFRMPRQVFNAQKKAQSSTDGGLSELDKAGFIKRQLVETRQITKHVAQILDSRMNTKYDENDKLIREVKVITLKSKLVSDFRKDFQFYKVREINNYHHAHDAYLNAVVGTALIKKYPKLESEFVYGDYKVYDVRKMIAKSEQEIGKATAKYFFYSNIMNFFKTEITLANGEIRKRPLIETNGETGEIVWDKGRDFATVRKVLSMPQVNIVKKTEVQTGGFSKESILPKRNSDKLIARKKDWDPKKYGGFDSPTVAYSVLVVAKVEKGKSKKLKSVKELLGITIMERSSFEKNPIDFLEAKGYKEVKKDLIIKLPKYSLFELENGRKRMLASAGELQKGNELALPSKYVNFLYLASHYEKLKGSPEDNEQKQLFVEQHKHYLDEIIEQISEFSKRVILADANLDKVLSAYNKHRDKPIREQAENIIHLFTLTNLGAPAAFKYFDTTIDRKRYTSTKEVLDATLIHQSITGLYETRIDLSQLGGD

SEQ ID NO: 1336 - protein, 1552 aa, synthetic construct
  REGION 1..1552: note = Description of Artificial Sequence: Synthetic polypeptide
MSEVEFSHEYWMRHALTLAKRARDEREVPVGAVLVLNNRVIGEGWNRAIGLHDPTAHAEIMALRQGGLVMQNYRLIDATLYVTFEPCVMCAGAMIHSRIGRVVFGVRNAKTGAAGSLMDVLHYPGMNHRVEITEGILADECAALLCYFFRMPRSGGSSGGSSGSETPGTSESATPESSGGSSGGSDKKYSIGLAIGTNSVGWAVITDEYKVPSKKFKVLGNTDRHSIKKNLIGALLFDSGETAEATRLKRTARRRYTRRKNRICYLQEIFSNEMAKVDDSFFHRLEESFLVEEDKKHERHPIFGNIVDEVAYHEKYPTIYHLRKKLVDSTDKADLRLIYLALAHMIKFRGHFLIEGDLNPDNSDVDKLFIQLVQTYNQLFEENPINASGVDAKAILSARLSKSRRLENLIAQLPGEKKNGLFGNLIALSLGLTPNFKSNFDLAEDAKLQLSKDTYDDDLDNLLAQIGDQYADLFLAAKNLSDAILLSDILRVNTEITKAPLSASMIKRYDEHHQDLTLLKALVRQQLPEKYKEIFFDQSKNGYAGYIDGGASQEEFYKFIKPILEKMDGTEELLVKLNREDLLRKQRTFDNGSIPHQIHLGELHAILRRQEDFYPFLKDNREKIEKILTFRIPYYVGPLARGNSRFAWMTRKSEETITPWNFEEVVDKGASAQSFIERMTNFDKNLPNEKVLPKHSLLYEYFTVYNELTKVKYVTEGMRKPAFLSGEQKKAIVDLLFKTNRKVTVKQLKEDYFKKIECFDSVEISGVEDRFNASLGTYHDLLKIIKDKDFLDNEENEDILEDIVLTLTLFEDREMIEERLKTYAHLFDDKVMKQLKRRRYTGWGRLSRKLINGIRDKQSGKTILDFLKSDGFANRNFMQLIHDDSLTFKEDIQKAQVSGQGDSLHEHIANLAGSPAIKKGILQTVKVVDELVKVMGRHKPENIVIEMARENQTTQKGQKNSRERMKRIEEGIKELGSQILKEHPVENTQLQNEKLYLYYLQNGRDMYVDQELDINRLSDYDVDHIVPQSFLKDDSIDNKVLTRSDKNRGKSDNVPSEEVVKKMKNYWRQLLNAKLITQRKFDNLTKAERGGLSELDKAGFIKRQLVETRQITKHVAQILDSRMNTKYDENDKLIREVKVITLKSKLVSDFRKDFQFYKVREINNYHHAHDAYLNAVVGTALIKKYPKLESEFVYGDYKVYDVRKMIAKSEQEIGKATAKYFFYSNIMNFFKTEITLANGEIRKRPLIETNGETGEIVWDKGRDFATVRKVLSMPQVNIVKKTEVQTGGFSKESILPKRNSDKLIARKKDWDPKKYGGFDSPTVAYSVLVVAKVEKGKSKKLKSVKELLGITIMERSSFEKNPIDFLEAKGYKEVKKDLIIKLPKYSLFELENGRKRMLASAGELQKGNELALPSKYVNFLYLASHYEKLKGSPEDNEQKQLFVEQHKHYLDEIIEQISEFSKRVILADANLDKVLSAYNKHRDKPIREQAENIIHLFTLTNLGAPAAFKYFDTTIDRKRYTSTKEVLDATLIHQSITGLYETRIDLSQLGGD

SEQ ID NO: 1337 - protein, 1545 aa, synthetic construct
  REGION 1..1545: note = Description of Artificial Sequence: Synthetic polypeptide
MSEVEFSHEYWMRHALTLAKRARDEREVPVGAVLVLNNRVIGEGWNRTAHAEIMALRQGGLVMQNYRLIDATLYVTFEPCVMCAGAMIHSRIGRVVFGVRNAKTGAAGSLMDVLHYPGMNHRVEITEGILADECAALLCYFFRMPRSGGSSGGSSGSETPGTSESATPESSGGSSGGSDKKYSIGLAIGTNSVGWAVITDEYKVPSKKFKVLGNTDRHSIKKNLIGALLFDSGETAEATRLKRTARRRYTRRKNRICYLQEIFSNEMAKVDDSFFHRLEESFLVEEDKKHERHPIFGNIVDEVAYHEKYPTIYHLRKKLVDSTDKADLRLIYLALAHMIKFRGHFLIEGDLNPDNSDVDKLFIQLVQTYNQLFEENPINASGVDAKAILSARLSKSRRLENLIAQLPGEKKNGLFGNLIALSLGLTPNFKSNFDLAEDAKLQLSKDTYDDDLDNLLAQIGDQYADLFLAAKNLSDAILLSDILRVNTEITKAPLSASMIKRYDEHHQDLTLLKALVRQQLPEKYKEIFFDQSKNGYAGYIDGGASQEEFYKFIKPILEKMDGTEELLVKLNREDLLRKQRTFDNGSIPHQIHLGELHAILRRQEDFYPFLKDNREKIEKILTFRIPYYVGPLARGNSRFAWMTRKSEETITPWNFEEVVDKGASAQSFIERMTNFDKNLPNEKVLPKHSLLYEYFTVYNELTKVKYVTEGMRKPAFLSGEQKKAIVDLLFKTNRKVTVKQLKEDYFKKIECFDSVEISGVEDRFNASLGTYHDLLKIIKDKDFLDNEENEDILEDIVLTLTLFEDREMIEERLKTYAHLFDDKVMKQLKRRRYTGWGRLSRKLINGIRDKQSGKTILDFLKSDGFANRNFMQLIHDDSLTFKEDIQKAQVSGQGDSLHEHIANLAGSPAIKKGILQTVKVVDELVKVMGRHKPENIVIEMARENQTTQKGQKNSRERMKRIEEGIKELGSQILKEHPVENTQLQNEKLYLYYLQNGRDMYVDQELDINRLSDYDVDHIVPQSFLKDDSIDNKVLTRSDKNRGKSDNVPSEEVVKKMKNYWRQLLNAKLITQRKFDNLTKAERGGLSELDKAGFIKRQLVETRQITKHVAQILDSRMNTKYDENDKLIREVKVITLKSKLVSDFRKDFQFYKVREINNYHHAHDAYLNAVVGTALIKKYPKLESEFVYGDYKVYDVRKMIAKSEQEIGKATAKYFFYSNIMNFFKTEITLANGEIRKRPLIETNGETGEIVWDKGRDFATVRKVLSMPQVNIVKKTEVQTGGFSKESILPKRNSDKLIARKKDWDPKKYGGFDSPTVAYSVLVVAKVEKGKSKKLKSVKELLGITIMERSSFEKNPIDFLEAKGYKEVKKDLIIKLPKYSLFELENGRKRMLASAGELQKGNELALPSKYVNFLYLASHYEKLKGSPEDNEQKQLFVEQHKHYLDEIIEQISEFSKRVILADANLDKVLSAYNKHRDKPIREQAENIIHLFTLTNLGAPAAFKYFDTTIDRKRYTSTKEVLDATLIHQSITGLYETRIDLSQLGGD

SEQ ID NO: 1338 - protein, 1541 aa, synthetic construct
  REGION 1..1541: note = Description of Artificial Sequence: Synthetic polypeptide
MDKKYSIGLAIGTNSVGWAVITDEYKVPSKKFKVLGNTDRHSIKKNLIGALLFDSGETAEATRLKRTARRRYTRRKNRICYLQEIFSNEMAKVDDSFFHRLEESFLVEEDKKHERHPIFGNIVDEVAYHEKYPTIYHLRKKLVDSTDKADLRLIYLALAHMIKFRGHFLIEGDLNPDNSDVDKLFIQLVQTYNQLFEENPINASGVDAKAILSARLSKSRRLENLIAQLPGEKKNGLFGNLIALSLGLTPNFKSNFDLAEDAKLQLSKDTYDDDLDNLLAQIGDQYADLFLAAKNLSDAILLSDILRVNTEITKAPLSASMIKRYDEHHQDLTLLKALVRQQLPEKYKEIFFDQSKNGYAGYIDGGASQEEFYKFIKPILEKMDGTEELLVKLNREDLLRKQRTFDNGSIPHQIHLGELHAILRRQEDFYPFLKDNREKIEKILTFRIPYYVGPLARGNSRFAWMTRKSEETITPWNFEEVVDKGASAQSFIERMTNFDKNLPNEKVLPKHSLLYEYFTVYNELTKVKYVTEGMRKPAFLSGEQKKAIVDLLFKTNRKVTVKQLKEDYFKKIECFDSVEISGVEDRFNASLGTYHDLLKIIKDKDFLDNEENEDILEDIVLTLTLFEDREMIEERLKTYAHLFDDKVMKQLKRRRYTGWGRLSRKLINGIRDKQSGKTILDFLKSDGFANRNFMQLIHDDSLTFKEDIQKAQVSGQGDSLHEHIANLAGSPAIKKGILQTVKVVDELVKVMGRHKPENIVIEMARENQTTQKGQKNSRERMKRIEEGIKELGSQILKEHPVENTQLQNEKLYLYYLQNGRDMYVDQELDINRLSDYDVDHIVPQSFLKDDSIDNKVLTRSDKNRGKSDNVPSEEVVKKMKNYWRQLLNAKLITQRKFDNLTKAERGGLSELDKAGFIKRQLVETRQITKHVAQILDSRMNTKYDENDKLIREVKVITLKSKLVSDFRKDFQFYKVREINNYHHAHDAYLNAVVGTALIKKYPKGSSGSETPGTSESATPESSGSEVEFSHEYWMRHALTLAKRARDEREVPVGAVLVLNNRVIGEGWNRAIGLHDPTAHAEIMALRQGGLVMQNYRLIDATLYVTFEPCVMCAGAMIHSRIGRVVFGVRNAKTGAAGSLMDVLHYPGMNHRVEITEGILADECAALLCYFFRMPRQLESEFVYGDYKVYDVRKMIAKSEQEIGKATAKYFFYSNIMNFFKTEITLANGEIRKRPLIETNGETGEIVWDKGRDFATVRKVLSMPQVNIVKKTEVQTGGFSKESILPKRNSDKLIARKKDWDPKKYGGFDSPTVAYSVLVVAKVEKGKSKKLKSVKELLGITIMERSSFEKNPIDFLEAKGYKEVKKDLIIKLPKYSLFELENGRKRMLASAGELQKGNELALPSKYVNFLYLASHYEKLKGSPEDNEQKQLFVEQHKHYLDEIIEQISEFSKRVILADANLDKVLSAYNKHRDKPIREQAENIIHLFTLTNLGAPAAFKYFDTTIDRKRYTSTKEVLDATLIHQSITGLYETRIDLSQLGGD

SEQ ID NO: 1339 - protein, 1541 aa, synthetic construct
  REGION 1..1541: note = Description of Artificial Sequence: Synthetic polypeptide
MDKKYSIGLAIGTNSVGWAVITDEYKVPSKKFKVLGNTDRHSIKKNLIGALLFDSGETAEATRLKRTARRRYTRRKNRICYLQEIFSNEMAKVDDSFFHRLEESFLVEEDKKHERHPIFGNIVDEVAYHEKYPTIYHLRKKLVDSTDKADLRLIYLALAHMIKFRGHFLIEGDLNPDNSDVDKLFIQLVQTYNQLFEENPINASGVDAKAILSARLSKSRRLENLIAQLPGEKKNGLFGNLIALSLGLTPNFKSNFDLAEDAKLQLSKDTYDDDLDNLLAQIGDQYADLFLAAKNLSDAILLSDILRVNTEITKAPLSASMIKRYDEHHQDLTLLKALVRQQLPEKYKEIFFDQSKNGYAGYIDGGASQEEFYKFIKPILEKMDGTEELLVKLNREDLLRKQRTFDNGSIPHQIHLGELHAILRRQEDFYPFLKDNREKIEKILTFRIPYYVGPLARGNSRFAWMTRKSEETITPWNFEEVVDKGASAQSFIERMTNFDKNLPNEKVLPKHSLLYEYFTVYNELTKVKYVTEGMRKPAFLSGEQKKAIVDLLFKTNRKVTVKQLKEDYFKKIECFDSVEISGVEDRFNASLGTYHDLLKIIKDKDFLDNEENEDILEDIVLTLTLFEDREMIEERLKTYAHLFDDKVMKQLKRRRYTGWGRLSRKLINGIRDKQSGKTILDFLKSDGFANRNFMQLIHDDSLTFKEDIQKAQVSGQGDSLHEHIANLAGSPAIKKGILQTVKVVDELVKVMGRHKPENIVIEMARENQTTQKGQKNSRERMKRIEEGIKELGSQILKEHPVENTQLQNEKLYLYYLQNGRDMYVDQELDINRLSDYDVDHIVPQSFLKDDSIDNKVLTRSDKNRGKSDNVPSEEVVKKMKNYWRQLLNAKLITQRKFDNLTKAERGGLSELDKAGFIKRQLVETRQITKHVAQILDSRMNTKYDENDKLIREVKVITLKSKLVSDFRKDFQFYKVREINNYHHAHDAYLNAVVGTALIKKYPKLGSSGSETPGTSESATPESSGSEVEFSHEYWMRHALTLAKRARDEREVPVGAVLVLNNRVIGEGWNRAIGLHDPTAHAEIMALRQGGLVMQNYRLIDATLYVTFEPCVMCAGAMIHSRIGRVVFGVRNAKTGAAGSLMDVLHYPGMNHRVEITEGILADECAALLCYFFRMPRQESEFVYGDYKVYDVRKMIAKSEQEIGKATAKYFFYSNIMNFFKTEITLANGEIRKRPLIETNGETGEIVWDKGRDFATVRKVLSMPQVNIVKKTEVQTGGFSKESILPKRNSDKLIARKKDWDPKKYGGFDSPTVAYSVLVVAKVEKGKSKKLKSVKELLGITIMERSSFEKNPIDFLEAKGYKEVKKDLIIKLPKYSLFELENGRKRMLASAGELQKGNELALPSKYVNFLYLASHYEKLKGSPEDNEQKQLFVEQHKHYLDEIIEQISEFSKRVILADANLDKVLSAYNKHRDKPIREQAENIIHLFTLTNLGAPAAFKYFDTTIDRKRYTSTKEVLDATLIHQSITGLYETRIDLSQLGGD

SEQ ID NO: 1340 - protein, 1541 aa, synthetic construct
  REGION 1..1541: note = Description of Artificial Sequence: Synthetic polypeptide
MDKKYSIGLAIGTNSVGWAVITDEYKVPSKKFKVLGNTDRHSIKKNLIGALLFDSGETAEATRLKRTARRRYTRRKNRICYLQEIFSNEMAKVDDSFFHRLEESFLVEEDKKHERHPIFGNIVDEVAYHEKYPTIYHLRKKLVDSTDKADLRLIYLALAHMIKFRGHFLIEGDLNPDNSDVDKLFIQLVQTYNQLFEENPINASGVDAKAILSARLSKSRRLENLIAQLPGEKKNGLFGNLIALSLGLTPNFKSNFDLAEDAKLQLSKDTYDDDLDNLLAQIGDQYADLFLAAKNLSDAILLSDILRVNTEITKAPLSASMIKRYDEHHQDLTLLKALVRQQLPEKYKEIFFDQSKNGYAGYIDGGASQEEFYKFIKPILEKMDGTEELLVKLNREDLLRKQRTFDNGSIPHQIHLGELHAILRRQEDFYPFLKDNREKIEKILTFRIPYYVGPLARGNSRFAWMTRKSEETITPWNFEEVVDKGASAQSFIERMTNFDKNLPNEKVLPKHSLLYEYFTVYNELTKVKYVTEGMRKPAFLSGEQKKAIVDLLFKTNRKVTVKQLKEDYFKKIECFDSVEISGVEDRFNASLGTYHDLLKIIKDKDFLDNEENEDILEDIVLTLTLFEDREMIEERLKTYAHLFDDKVMKQLKRRRYTGWGRLSRKLINGIRDKQSGKTILDFLKSDGFANRNFMQLIHDDSLTFKEDIQKAQVSGQGDSLHEHIANLAGSPAIKKGILQTVKVVDELVKVMGRHKPENIVIEMARENQTTQKGQKNSRERMKRIEEGIKELGSQILKEHPVENTQLQNEKLYLYYLQNGRDMYVDQELDINRLSDYDVDHIVPQSFLKDDSIDNKVLTRSDKNRGKSDNVPSEEVVKKMKNYWRQLLNAKLITQRKFDNLTKAERGGLSELDKAGFIKRQLVETRQITKHVAQILDSRMNTKYDENDKLIREVKVITLKSKLVSDFRKDFQFYKVREINNYHHAHDAYLNAVVGTALIKKYPKLEGSSGSETPGTSESATPESSGSEVEFSHEYWMRHALTLAKRARDEREVPVGAVLVLNNRVIGEGWNRAIGLHDPTAHAEIMALRQGGLVMQNYRLIDATLYVTFEPCVMCAGAMIHSRIGRVVFGVRNAKTGAAGSLMDVLHYPGMNHRVEITEGILADECAALLCYFFRMPRQSEFVYGDYKVYDVRKMIAKSEQEIGKATAKYFFYSNIMNFFKTEITLANGEIRKRPLIETNGETGEIVWDKGRDFATVRKVLSMPQVNIVKKTEVQTGGFSKESILPKRNSDKLIARKKDWDPKKYGGFDSPTVAYSVLVVAKVEKGKSKKLKSVKELLGITIMERSSFEKNPIDFLEAKGYKEVKKDLIIKLPKYSLFELENGRKRMLASAGELQKGNELALPSKYVNFLYLASHYEKLKGSPEDNEQKQLFVEQHKHYLDEIIEQISEFSKRVILADANLDKVLSAYNKHRDKPIREQAENIIHLFTLTNLGAPAAFKYFDTTIDRKRYTSTKEVLDATLIHQSITGLYETRIDLSQLGGD

SEQ ID NO: 1341 - protein, 1541 aa, synthetic construct
  REGION 1..1541: note = Description of Artificial Sequence: Synthetic polypeptide
MDKKYSIGLAIGTNSVGWAVITDEYKVPSKKFKVLGNTDRHSIKKNLIGALLFDSGETAEATRLKRTARRRYTRRKNRICYLQEIFSNEMAKVDDSFFHRLEESFLVEEDKKHERHPIFGNIVDEVAYHEKYPTIYHLRKKLVDSTDKADLRLIYLALAHMIKFRGHFLIEGDLNPDNSDVDKLFIQLVQTYNQLFEENPINASGVDAKAILSARLSKSRRLENLIAQLPGEKKNGLFGNLIALSLGLTPNFKSNFDLAEDAKLQLSKDTYDDDLDNLLAQIGDQYADLFLAAKNLSDAILLSDILRVNTEITKAPLSASMIKRYDEHHQDLTLLKALVRQQLPEKYKEIFFDQSKNGYAGYIDGGASQEEFYKFIKPILEKMDGTEELLVKLNREDLLRKQRTFDNGSIPHQIHLGELHAILRRQEDFYPFLKDNREKIEKILTFRIPYYVGPLARGNSRFAWMTRKSEETITPWNFEEVVDKGASAQSFIERMTNFDKNLPNEKVLPKHSLLYEYFTVYNELTKVKYVTEGMRKPAFLSGEQKKAIVDLLFKTNRKVTVKQLKEDYFKKIECFDSVEISGVEDRFNASLGTYHDLLKIIKDKDFLDNEENEDILEDIVLTLTLFEDREMIEERLKTYAHLFDDKVMKQLKRRRYTGWGRLSRKLINGIRDKQSGKTILDFLKSDGFANRNFMQLIHDDSLTFKEDIQKAQVSGQGDSLHEHIANLAGSPAIKKGILQTVKVVDELVKVMGRHKPENIVIEMARENQTTQKGQKNSRERMKRIEEGIKELGSQILKEHPVENTQLQNEKLYLYYLQNGRDMYVDQELDINRLSDYDVDHIVPQSFLKDDSIDNKVLTRSDKNRGKSDNVPSEEVVKKMKNYWRQLLNAKLITQRKFDNLTKAERGGLSELDKAGFIKRQLVETRQITKHVAQILDSRMNTKYDENDKLIREVKVITLKSKLVSDFRKDFQFYKVREINNYHHAHDAYLNAVVGTALIKKYPKLESGSSGSETPGTSESATPESSGSEVEFSHEYWMRHALTLAKRARDEREVPVGAVLVLNNRVIGEGWNRAIGLHDPTAHAEIMALRQGGLVMQNYRLIDATLYVTFEPCVMCAGAMIHSRIGRVVFGVRNAKTGAAGSLMDVLHYPGMNHRVEITEGILADECAALLCYFFRMPRQEFVYGDYKVYDVRKMIAKSEQEIGKATAKYFFYSNIMNFFKTEITLANGEIRKRPLIETNGETGEIVWDKGRDFATVRKVLSMPQVNIVKKTEVQTGGFSKESILPKRNSDKLIARKKDWDPKKYGGFDSPTVAYSVLVVAKVEKGKSKKLKSVKELLGITIMERSSFEKNPIDFLEAKGYKEVKKDLIIKLPKYSLFELENGRKRMLASAGELQKGNELALPSKYVNFLYLASHYEKLKGSPEDNEQKQLFVEQHKHYLDEIIEQISEFSKRVILADANLDKVLSAYNKHRDKPIREQAENIIHLFTLTNLGAPAAFKYFDTTIDRKRYTSTKEVLDATLIHQSITGLYETRIDLSQLGGD

SEQ ID NO: 1342 - protein, 1541 aa, synthetic construct
  REGION 1..1541: note = Description of Artificial Sequence: Synthetic polypeptide
MDKKYSIGLAIGTNSVGWAVITDEYKVPSKKFKVLGNTDRHSIKKNLIGALLFDSGETAEATRLKRTARRRYTRRKNRICYLQEIFSNEMAKVDDSFFHRLEESFLVEEDKKHERHPIFGNIVDEVAYHEKYPTIYHLRKKLVDSTDKADLRLIYLALAHMIKFRGHFLIEGDLNPDNSDVDKLFIQLVQTYNQLFEENPINASGVDAKAILSARLSKSRRLENLIAQLPGEKKNGLFGNLIALSLGLTPNFKSNFDLAEDAKLQLSKDTYDDDLDNLLAQIGDQYADLFLAAKNLSDAILLSDILRVNTEITKAPLSASMIKRYDEHHQDLTLLKALVRQQLPEKYKEIFFDQSKNGYAGYIDGGASQEEFYKFIKPILEKMDGTEELLVKLNREDLLRKQRTFDNGSIPHQIHLGELHAILRRQEDFYPFLKDNREKIEKILTFRIPYYVGPLARGNSRFAWMTRKSEETITPWNFEEVVDKGASAQSFIERMTNFDKNLPNEKVLPKHSLLYEYFTVYNELTKVKYVTEGMRKPAFLSGEQKKAIVDLLFKTNRKVTVKQLKEDYFKKIECFDSVEISGVEDRFNASLGTYHDLLKIIKDKDFLDNEENEDILEDIVLTLTLFEDREMIEERLKTYAHLFDDKVMKQLKRRRYTGWGRLSRKLINGIRDKQSGKTILDFLKSDGFANRNFMQLIHDDSLTFKEDIQKAQVSGQGDSLHEHIANLAGSPAIKKGILQTVKVVDELVKVMGRHKPENIVIEMARENQTTQKGQKNSRERMKRIEEGIKELGGSSGSETPGTSESATPESSGSEVEFSHEYWMRHALTLAKRARDEREVPVGAVLVLNNRVIGEGWNRAIGLHDPTAHAEIMALRQGGLVMQNYRLIDATLYVTFEPCVMCAGAMIHSRIGRVVFGVRNAKTGAAGSLMDVLHYPGMNHRVEITEGILADECAALLCYFFRMPRQSQILKEHPVENTQLQNEKLYLYYLQNGRDMYVDQELDINRLSDYDVDHIVPQSFLKDDSIDNKVLTRSDKNRGKSDNVPSEEVVKKMKNYWRQLLNAKLITQRKFDNLTKAERGGLSELDKAGFIKRQLVETRQITKHVAQILDSRMNTKYDENDKLIREVKVITLKSKLVSDFRKDFQFYKVREINNYHHAHDAYLNAVVGTALIKKYPKLESEFVYGDYKVYDVRKMIAKSEQEIGKATAKYFFYSNIMNFFKTEITLANGEIRKRPLIETNGETGEIVWDKGRDFATVRKVLSMPQVNIVKKTEVQTGGFSKESILPKRNSDKLIARKKDWDPKKYGGFDSPTVAYSVLVVAKVEKGKSKKLKSVKELLGITIMERSSFEKNPIDFLEAKGYKEVKKDLIIKLPKYSLFELENGRKRMLASAGELQKGNELALPSKYVNFLYLASHYEKLKGSPEDNEQKQLFVEQHKHYLDEIIEQISEFSKRVILADANLDKVLSAYNKHRDKPIREQAENIIHLFTLTNLGAPAAFKYFDTTIDRKRYTSTKEVLDATLIHQSITGLYETRIDLSQLGGD

SEQ ID NO: 1343 - protein, 1541 aa, synthetic construct
  REGION 1..1541: note = Description of Artificial Sequence: Synthetic polypeptide
MDKKYSIGLAIGTNSVGWAVITDEYKVPSKKFKVLGNTDRHSIKKNLIGALLFDSGETAEATRLKRTARRRYTRRKNRICYLQEIFSNEMAKVDDSFFHRLEESFLVEEDKKHERHPIFGNIVDEVAYHEKYPTIYHLRKKLVDSTDKADLRLIYLALAHMIKFRGHFLIEGDLNPDNSDVDKLFIQLVQTYNQLFEENPINASGVDAKAILSARLSKSRRLENLIAQLPGEKKNGLFGNLIALSLGLTPNFKSNFDLAEDAKLQLSKDTYDDDLDNLLAQIGDQYADLFLAAKNLSDAILLSDILRVNTEITKAPLSASMIKRYDEHHQDLTLLKALVRQQLPEKYKEIFFDQSKNGYAGYIDGGASQEEFYKFIKPILEKMDGTEELLVKLNREDLLRKQRTFDNGSIPHQIHLGELHAILRRQEDFYPFLKDNREKIEKILTFRIPYYVGPLARGNSRFAWMTRKSEETITPWNFEEVVDKGASAQSFIERMTNFDKNLPNEKVLPKHSLLYEYFTVYNELTKVKYVTEGMRKPAFLSGEQKKAIVDLLFKTNRKVTVKQLKEDYFKKIECFDSVEISGVEDRFNASLGTYHDLLKIIKDKDFLDNEENEDILEDIVLTLTLFEDREMIEERLKTYAHLFDDKVMKQLKRRRYTGWGRLSRKLINGIRDKQSGKTILDFLKSDGFANRNFMQLIHDDSLTFKEDIQKAQVSGQGDSLHEHIANLAGSPAIKKGILQTVKVVDELVKVMGRHKPENIVIEMARENQTTQKGQKNSRERMKRIEEGIKELGSSGSETPGTSESATPESSGSEVEFSHEYWMRHALTLAKRARDEREVPVGAVLVLNNRVIGEGWNRAIGLHDPTAHAEIMALRQGGLVMQNYRLIDATLYVTFEPCVMCAGAMIHSRIGRVVFGVRNAKTGAAGSLMDVLHYPGMNHRVEITEGILADECAALLCYFFRMPRQGSQILKEHPVENTQLQNEKLYLYYLQNGRDMYVDQELDINRLSDYDVDHIVPQSFLKDDSIDNKVLTRSDKNRGKSDNVPSEEVVKKMKNYWRQLLNAKLITQRKFDNLTKAERGGLSELDKAGFIKRQLVETRQITKHVAQILDSRMNTKYDENDKLIREVKVITLKSKLVSDFRKDFQFYKVREINNYHHAHDAYLNAVVGTALIKKYPKLESEFVYGDYKVYDVRKMIAKSEQEIGKATAKYFFYSNIMNFFKTEITLANGEIRKRPLIETNGETGEIVWDKGRDFATVRKVLSMPQVNIVKKTEVQTGGFSKESILPKRNSDKLIARKKDWDPKKYGGFDSPTVAYSVLVVAKVEKGKSKKLKSVKELLGITIMERSSFEKNPIDFLEAKGYKEVKKDLIIKLPKYSLFELENGRKRMLASAGELQKGNELALPSKYVNFLYLASHYEKLKGSPEDNEQKQLFVEQHKHYLDEIIEQISEFSKRVILADANLDKVLSAYNKHRDKPIREQAENIIHLFTLTNLGAPAAFKYFDTTIDRKRYTSTKEVLDATLIHQSITGLYETRIDLSQLGGD

SEQ ID NO: 1344 - protein, 1541 aa, synthetic construct
  REGION 1..1541: note = Description of Artificial Sequence: Synthetic polypeptide
MDKKYSIGLAIGTNSVGWAVITDEYKVPSKKFKVLGNTDRHSIKKNLIGALLFDSGETAEATRLKRTARRRYTRRKNRICYLQEIFSNEMAKVDDSFFHRLEESFLVEEDKKHERHPIFGNIVDEVAYHEKYPTIYHLRKKLVDSTDKADLRLIYLALAHMIKFRGHFLIEGDLNPDNSDVDKLFIQLVQTYNQLFEENPINASGVDAKAILSARLSKSRRLENLIAQLPGEKKNGLFGNLIALSLGLTPNFKSNFDLAEDAKLQLSKDTYDDDLDNLLAQIGDQYADLFLAAKNLSDAILLSDILRVNTEITKAPLSASMIKRYDEHHQDLTLLKALVRQQLPEKYKEIFFDQSKNGYAGYIDGGASQEEFYKFIKPILEKMDGTEELLVKLNREDLLRKQRTFDNGSIPHQIHLGELHAILRRQEDFYPFLKDNREKIEKILTFRIPYYVGPLARGNSRFAWMTRKSEETITPWNFEEVVDKGASAQSFIERMTNFDKNLPNEKVLPKHSLLYEYFTVYNELTKVKYVTEGMRKPAFLSGEQKKAIVDLLFKTNRKVTVKQLKEDYFKKIECFDSVEISGVEDRFNASLGTYHDLLKIIKDKDFLDNEENEDILEDIVLTLTLFEDREMIEERLKTYAHLFDDKVMKQLKRRRYTGWGRLSRKLINGIRDKQSGKTILDFLKSDGFANRNFMQLIHDDSLTFKEDIQKAQVSGQGDSLHEHIANLAGSPAIKKGILQTVKVVDELVKVMGRHKPENIVIEMARENQTTQKGQKNSRERMKRIEEGIKEGSSGSETPGTSESATPESSGSEVEFSHEYWMRHALTLAKRARDEREVPVGAVLVLNNRVIGEGWNRAIGLHDPTAHAEIMALRQGGLVMQNYRLIDATLYVTFEPCVMCAGAMIHSRIGRVVFGVRNAKTGAAGSLMDVLHYPGMNHRVEITEGILADECAALLCYFFRMPRQLGSQILKEHPVENTQLQNEKLYLYYLQNGRDMYVDQELDINRLSDYDVDHIVPQSFLKDDSIDNKVLTRSDKNRGKSDNVPSEEVVKKMKNYWRQLLNAKLITQRKFDNLTKAERGGLSELDKAGFIKRQLVETRQITKHVAQILDSRMNTKYDENDKLIREVKVITLKSKLVSDFRKDFQFYKVREINNYHHAHDAYLNAVVGTALIKKYPKLESEFVYGDYKVYDVRKMIAKSEQEIGKATAKYFFYSNIMNFFKTEITLANGEIRKRPLIETNGETGEIVWDKGRDFATVRKVLSMPQVNIVKKTEVQTGGFSKESILPKRNSDKLIARKKDWDPKKYGGFDSPTVAYSVLVVAKVEKGKSKKLKSVKELLGITIMERSSFEKNPIDFLEAKGYKEVKKDLIIKLPKYSLFELENGRKRMLASAGELQKGNELALPSKYVNFLYLASHYEKLKGSPEDNEQKQLFVEQHKHYLDEIIEQISEFSKRVILADANLDKVLSAYNKHRDKPIREQAENIIHLFTLTNLGAPAAFKYFDTTIDRKRYTSTKEVLDATLIHQSITGLYETRIDLSQLGGD

SEQ ID NO: 1345 - protein, 1484 aa, synthetic construct
  REGION 1..1484: note = Description of Artificial Sequence: Synthetic polypeptide
MDKKYSIGLAIGTNSVGWAVITDEYKVPSKKFKVLGNTDRHSIKKNLIGALLFDSGETAEATRLKRTARRRYTRRKNRICYLQEIFSNEMAKVDDSFFHRLEESFLVEEDKKHERHPIFGNIVDEVAYHEKYPTIYHLRKKLVDSTDKADLRLIYLALAHMIKFRGHFLIEGDLNPDNSDVDKLFIQLVQTYNQLFEENPINASGVDAKAILSARLSKSRRLENLIAQLPGEKKNGLFGNLIALSLGLTPNFKSNFDLAEDAKLQLSKDTYDDDLDNLLAQIGDQYADLFLAAKNLSDAILLSDILRVNTEITKAPLSASMIKRYDEHHQDLTLLKALVRQQLPEKYKEIFFDQSKNGYAGYIDGGASQEEFYKFIKPILEKMDGTEELLVKLNREDLLRKQRTFDNGSIPHQIHLGELHAILRRQEDFYPFLKDNREKIEKILTFRIPYYVGPLARGNSRFAWMTRKSEETITPWNFEEVVDKGASAQSFIERMTNFDKNLPNEKVLPKHSLLYEYFTVYNELTKVKYVTEGMRKPAFLSGEQKKAIVDLLFKTNRKVTVKQLKEDYFKKIECFDSVEISGVEDRFNASLGTYHDLLKIIKDKDFLDNEENEDILEDIVLTLTLFEDREMIEERLKTYAHLFDDKVMKQLKRRRYTGWGRLSRKLINGIRDKQSGKTILDFLKSDGFANRNFMQLIHDDSLTFKEDIQKAQVSGQGDSLHEHIANLAGSPAIKKGILQTVKVVDELVKVMGRHKPENIVIEMARENQTTQKGQKNSRERMKRIEEGIKELGSQILKEHPVENTQLQNEKLYLYYLQNGRDMYVDQELDINRLSDYDVDHIVPQSFLKDDSIDNKVLTRSDKNRGKSDNVPSEEVVKKMKNYWRQLLNAKLITQRKFDNLTKAERGGLSELDKAGFIKRQLVETRQITKHVAQILDSRMNTKYDENDKLIREVKVITLKSKLVSDFRKDFQFYKVREINNYHHAHDAYLNAVVGTALIKKYPKLESEFVYGDYKVYSSGSEVEFSHEYWMRHALTLAKRARDEREVPVGAVLVLNNRVIGEGWNRAIGLHDPTAHAEIMALRQGGLVMQNYRLIDATLYVTFEPCVMCAGAMIHSRIGRVVFGVRNAKTGAAGSLMDVLHYPGMNHRVEITEGILADECAALLCYFFRMPRQVFNAQKKAQSSTDGEIVWDKGRDFATVRKVLSMPQVNIVKKTEVQTGGFSKESILPKRNSDKLIARKKDWDPKKYGGFDSPTVAYSVLVVAKVEKGKSKKLKSVKELLGITIMERSSFEKNPIDFLEAKGYKEVKKDLIIKLPKYSLFELENGRKRMLASAGELQKGNELALPSKYVNFLYLASHYEKLKGSPEDNEQKQLFVEQHKHYLDEIIEQISEFSKRVILADANLDKVLSAYNKHRDKPIREQAENIIHLFTLTNLGAPAAFKYFDTTIDRKRYTSTKEVLDATLIHQSITGLYETRIDLSQLGGD

SEQ ID NO: 1346 - protein, 1554 aa, synthetic construct
  REGION 1..1554: note = Description of Artificial Sequence: Synthetic polypeptide
MDKKYSIGLAIGTNSVGWAVITDEYKVPSKKFKVLGNTDRHSIKKNLIGALLFDSGETAEATRLKRTARRRYTRRKNRICYLQEIFSNEMAKVDDSFFHRLEESFLVEEDKKHERHPIFGNIVDEVAYHEKYPTIYHLRKKLVDSTDKADLRLIYLALAHMIKFRGHFLIEGDLNPDNSDVDKLFIQLVQTYNQLFEENPINASGVDAKAILSARLSKSRRLENLIAQLPGEKKNGLFGNLIALSLGLTPNFKSNFDLAEDAKLQLSKDTYDDDLDNLLAQIGDQYADLFLAAKNLSDAILLSDILRVNTEITKAPLSASMIKRYDEHHQDLTLLKALVRQQLPEKYKEIFFDQSKNGYAGYIDGGASQEEFYKFIKPILEKMDGTEELLVKLNREDLLRKQRTFDNGSIPHQIHLGELHAILRRQEDFYPFLKDNREKIEKILTFRIPYYVGPLARGNSRFAWMTRKSEETITPWNFEEVVDKGASAQSFIERMTNFDKNLPNEKVLPKHSLLYEYFTVYNELTKVKYVTEGMRKPAFLSGEQKKAIVDLLFKTNRKVTVKQLKEDYFKKIECFDSVEISGVEDRFNASLGTYHDLLKIIKDKDFLDNEENEDILEDIVLTLTLFEDREMIEERLKTYAHLFDDKVMKQLKRRRYTGWGRLSRKLINGIRDKQSGKTILDFLKSDGFANRNFMQLIHDDSLTFKEDIQKAQVSGQGDSLHEHIANLAGSPAIKKGILQTVKVVDELVKVMGRHKPENIVIEMARENQTTQKGQKNSRERMKRIEEGIKELGSQILKEHPVENTQLQNEKLYLYYLQNGRDMYVDQELDINRLSDYDVDHIVPQSFLKDDSIDNKVLTRSDKNRGKSDNVPSEEVVKKMKNYWRQLLNAKLITQRKFDNLTKAERGGLSELDKAGFIKRQLVETRQITKHVAQILDSRMNTKYDENDKLIREVKVITLKSKLVSDFRKDFQFYKVREINNYHHAHDAYLNAVVGTALIKKYPKLESEFVYGDYKVYDVRKMIAKSEQEIGKATAKYFFYSNIMNFFKTEITLANGEIRKRPLIETNMNHRVEITEGILADECAALLCYFFRMPRQVFNAQKKAQSSTDGSSGSETPGTSESATPESSGSEVEFSHEYWMRHALTLAKRARDEREVPVGAVLVLNNRVIGEGWNRAIGLHDPTAHAEIMALRQGGLVMQNYRLIDATLYVTFEPCVMCAGAMIHSRIGRVVFGVRNAKTGAAGSLMDVLHYPGGETGEIVWDKGRDFATVRKVLSMPQVNIVKKTEVQTGGFSKESILPKRNSDKLIARKKDWDPKKYGGFDSPTVAYSVLVVAKVEKGKSKKLKSVKELLGITIMERSSFEKNPIDFLEAKGYKEVKKDLIIKLPKYSLFELENGRKRMLASAGELQKGNELALPSKYVNFLYLASHYEKLKGSPEDNEQKQLFVEQHKHYLDEIIEQISEFSKRVILADANLDKVLSAYNKHRDKPIREQAENIIHLFTLTNLGAPAAFKYFDTTIDRKRYTSTKEVLDATLIHQSITGLYETRIDLSQLGGD

SEQ ID NO: 1347 - protein, 1554 aa, synthetic construct
  REGION 1..1554: note = Description of Artificial Sequence: Synthetic polypeptide
MDKKYSIGLAIGTNSVGWAVITDEYKVPSKKFKVLGNTDRHSIKKNLIGALLFDSGETAEATRLKRTARRRYTRRKNRICYLQEIFSNEMAKVDDSFFHRLEESFLVEEDKKHERHPIFGNIVDEVAYHEKYPTIYHLRKKLVDSTDKADLRLIYLALAHMIKFRGHFLIEGDLNPDNSDVDKLFIQLVQTYNQLFEENPINASGVDAKAILSARLSKSRRLENLIAQLPGEKKNGLFGNLIALSLGLTPNFKSNFDLAEDAKLQLSKDTYDDDLDNLLAQIGDQYADLFLAAKNLSDAILLSDILRVNTEITKAPLSASMIKRYDEHHQDLTLLKALVRQQLPEKYKEIFFDQSKNGYAGYIDGGASQEEFYKFIKPILEKMDGTEELLVKLNREDLLRKQRTFDNGSIPHQIHLGELHAILRRQEDFYPFLKDNREKIEKILTFRIPYYVGPLARGNSRFAWMTRKSEETITPWNFEEVVDKGASAQSFIERMTNFDKNLPNEKVLPKHSLLYEYFTVYNELTKVKYVTEGMRKPAFLSGEQKKAIVDLLFKTNRKVTVKQLKEDYFKKIECFDSVEISGVEDRFNASLGTYHDLLKIIKDKDFLDNEENEDILEDIVLTLTLFEDREMIEERLKTYAHLFDDKVMKQLKRRRYTGWGRLSRKLINGIRDKQSGKTILDFLKSDGFANRNFMQLIHDDSGSSGSETPGTSESATPESSGSEVEFSHEYWMRHALTLAKRARDEREVPVGAVLVLNNRVIGEGWNRAIGLHDPTAHAEIMALRQGGLVMQNYRLIDATLYVTFEPCVMCAGAMIHSRIGRVVFGVRNAKTGAAGSLMDVLHYPGMNHRVEITEGILADECAALLCYFFRMPRQVFNAQKKAQSSTDLTFKEDIQKAQVSGQGDSLHEHIANLAGSPAIKKGILQTVKVVDELVKVMGRHKPENIVIEMARENQTTQKGQKNSRERMKRIEEGIKELGSQILKEHPVENTQLQNEKLYLYYLQNGRDMYVDQELDINRLSDYDVDHIVPQSFLKDDSIDNKVLTRSDKNRGKSDNVPSEEVVKKMKNYWRQLLNAKLITQRKFDNLTKAERGGLSELDKAGFIKRQLVETRQITKHVAQILDSRMNTKYDENDKLIREVKVITLKSKLVSDFRKDFQFYKVREINNYHHAHDAYLNAVVGTALIKKYPKLESEFVYGDYKVYDVRKMIAKSEQEIGKATAKYFFYSNIMNFFKTEITLANGEIRKRPLIETNGETGEIVWDKGRDFATVRKVLSMPQVNIVKKTEVQTGGFSKESILPKRNSDKLIARKKDWDPKKYGGFDSPTVAYSVLVVAKVEKGKSKKLKSVKELLGITIMERSSFEKNPIDFLEAKGYKEVKKDLIIKLPKYSLFELENGRKRMLASAGELQKGNELALPSKYVNFLYLASHYEKLKGSPEDNEQKQLFVEQHKHYLDEIIEQISEFSKRVILADANLDKVLSAYNKHRDKPIREQAENIIHLFTLTNLGAPAAFKYFDTTIDRKRYTSTKEVLDATLIHQSITGLYETRIDLSQLGGD

SEQ ID NO: 1348 - protein, 1554 aa, synthetic construct
  REGION 1..1554: note = Description of Artificial Sequence: Synthetic polypeptide
MDKKYSIGLAIGTNSVGWAVITDEYKVPSKKFKVLGNTDRHSIKKNLIGALLFDSGETAEATRLKRTARRRYTRRKNRICYLQEIFSNEMAKVDDSFFHRLEESFLVEEDKKHERHPIFGNIVDEVAYHEKYPTIYHLRKKLVDSTDKADLRLIYLALAHMIKFRGHFLIEGDLNPDNSDVDKLFIQLVQTYNQLFEENPINASGVDAKAILSARLSKSRRLENLIAQLPGEKKNGLFGNLIALSLGLTPNFKSNFDLAEDAKLQLSKDTYDDDLDNLLAQIGDQYADLFLAAKNLSDAILLSDILRVNTEITKAPLSASMIKRYDEHHQDLTLLKALVRQQLPEKYKEIFFDQSKNGYAGYIDGGASQEEFYKFIKPILEKMDGTEELLVKLNREDLLRKQRTFDNGSIPHQIHLGELHAILRRQEDFYPFLKDNREKIEKILTFRIPYYVGPLARGNSRFAWMTRKSEETITPWNFEEVVDKGASAQSFIERMTNFDKNLPNEKVLPKHSLLYEYFTVYNELTKVKYVTEGMRKPAFLSGEQKKAIVDLLFKTNRKVTVKQLKEDYFKKIECFDSVEISGVEDRFNASLGTYHDLLKIIKDKDFLDNEENEDILEDIVLTLTLFEDREMIEERLKTYAHLFDDKVMKQLKRRRYTGWGRLSRKLINGIRDKQSGKTILDFLKSDGFANRNFMQLIHDDSLTFKEDIQKAQVSGQGDSLHEHIANLAGSPAIKKGILQTVKVVDELVKVMGRHKPENIVIEMARENQTTQKGQKNSRERMKRIEEGIKELGSQILKEHPVENTQLQNEKLYLYYLQNGRDMYVDQELDINRLSDYDVDHIVPQSFLKDDSIDNKVLTRSDKNRGKSDNVPSEEVVKKMKNYWRQLLNAKLITQRKFDNLTKAERGGLSELDKAGFIKRQLVETRQITKHVAQILDSRMNTKYDENDKLIREVKVITLKSKLVSDFRKDFQFYKVREINNYHHAHDAYLNAVVGTALIKKYPKLESEFVYGDYKVYDVRKMIAKSEQEIGKATAKYFFYSNIMNFFKTEITLANGEIRKRPLIETNGETGEIVWDKGRDFATVRKVLSMPQVNIVKKTEVQTGGFSKESILPKRNSDKLIARKKDWDPKKYGGFDSPTVAYSVLVVAKVEKGKSKKLKSVKELLGITIMERSSFEKNPIDFLEAKGYKEVKKDLIIKLPKYSLFELENGRKRMLASAGELQKGNELALPSKYVNFLYLASHYEKLKGSMNHRVEITEGILADECAALLCYFFRMPRQVFNAQKKAQSSTDGSSGSETPGTSESATPESSGSEVEFSHEYWMRHALTLAKRARDEREVPVGAVLVLNNRVIGEGWNRAIGLHDPTAHAEIMALRQGGLVMQNYRLIDATLYVTFEPCVMCAGAMIHSRIGRVVFGVRNAKTGAAGSLMDVLHYPGPEDNEQKQLFVEQHKHYLDEIIEQISEFSKRVILADANLDKVLSAYNKHRDKPIREQAENIIHLFTLTNLGAPAAFKYFDTTIDRKRYTSTKEVLDATLIHQSITGLYETRIDLSQLGGD

SEQ ID NO: 1349 - protein, 1554 aa, synthetic construct
  REGION 1..1554: note = Description of Artificial Sequence: Synthetic polypeptide
MDKKYSIGLAIGTNSVGWAVITDEYKVPSKKFKVLGNTDRHSIKKNLIGALLFDSGETAEATRLKRTARRRYTRRKNRICYLQEIFSNEMAKVDDSFFHRLEESFLVEEDKKHERHPIFGNIVDEVAYHEKYPTIYHLRKKLVDSTDKADLRLIYLALAHMIKFRGHFLIEGDLNPDNSDVDKLFIQLVQTYNQLFEENPINASGVDAKAILSARLSKSRRLENLIAQLPGEKKNGLFGNLIALSLGLTPNFKSNFDLAEDAKLQLSKDTYDDDLDNLLAQIGDQYADLFLAAKNLSDAILLSDILRVNTEITKAPLSASMIKRYDEHHQDLTLLKALVRQQLPEKYKEIFFDQSKNGYAGYIDGGASQEEFYKFIKPILEKMDGTEELLVKLNREDLLRKQRTFDNGSIPHQIHLGELHAILRRQEDFYPFLKDNREKIEKILTFRIPYYVGPLARGNSRFAWMTRKSEETITPWNFEEVVDKGASAQSFIERMTNFDKNLPNEKVLPKHSLLYEYFTVYNELTKVKYVTEGMRKPAFLSGEQKKAIVDLLFKTNRKVTVKQLKEDYFKKIECFDSVEISGVEDRFNASLGTYHDLLKIIKDKDFLDNEENEDILEDIVLTLTLFEDREMIEERLKTYAHLFDDKVMKQLKRRRYTGWGRLSRKLINGIRDKQSGKTILDFLKSDGFANRNFMQLIHDDSLTFKEDIQKAQVSGQGDSLHEHIANLAGSPAIKKGILQTVKVVDELVKVMGRHKPENIVIEMARENQTTQKGQKNSRERMKRIEEGIKELGSQILKEHPVENTQLQNEKLYLYYLQNGRDMYVDQELDINRLSDYDVDHIVPQSFLKDDSIDNKVLTRSDKNRGKSDNVPSEEVVKKMKNYWRQLLNAKLITQRKFDNLTKAERGGLSELDKAGFIKRQLVETRQITKHVAQILDSRMNTKYDENDKLIREVKVITLKSKLVSDFRKDFQFYKVREINNYHHAHDAYLNAVVGTALIKKYPKLESEFVYGDYKVYDVRKMIAKSEQEIGKATAKYFFYSNIMNFFKTEITLAMNHRVEITEGILADECAALLCYFFRMPRQVFNAQKKAQSSTDGSSGSETPGTSESATPESSGSEVEFSHEYWMRHALTLAKRARDEREVPVGAVLVLNNRVIGEGWNRAIGLHDPTAHAEIMALRQGGLVMQNYRLIDATLYVTFEPCVMCAGAMIHSRIGRVVFGVRNAKTGAAGSLMDVLHYPGNGEIRKRPLIETNGETGEIVWDKGRDFATVRKVLSMPQVNIVKKTEVQTGGFSKESILPKRNSDKLIARKKDWDPKKYGGFDSPTVAYSVLVVAKVEKGKSKKLKSVKELLGITIMERSSFEKNPIDFLEAKGYKEVKKDLIIKLPKYSLFELENGRKRMLASAGELQKGNELALPSKYVNFLYLASHYEKLKGSPEDNEQKQLFVEQHKHYLDEIIEQISEFSKRVILADANLDKVLSAYNKHRDKPIREQAENIIHLFTLTNLGAPAAFKYFDTTIDRKRYTSTKEVLDATLIHQSITGLYETRIDLSQLGGD

SEQ ID NO: 1350 - protein, 1554 aa, synthetic construct
  REGION 1..1554: note = Description of Artificial Sequence: Synthetic polypeptide
MDKKYSIGLAIGTNSVGWAVITDEYKVPSKKFKVLGNTDRHSIKKNLIGALLFDSGETAEATRLKRTARRRYTRRKNRICYLQEIFSNEMAKVDDSFFHRLEESFLVEEDKKHERHPIFGNIVDEVAYHEKYPTIYHLRKKLVDSTDKADLRLIYLALAHMIKFRGHFLIEGDLNPDNSDVDKLFIQLVQTYNQLFEENPINASGVDAKAILSARLSKSRRLENLIAQLPGEKKNGLFGNLIALSLGLTPNFKSNFDLAEDAKLQLSKDTYDDDLDNLLAQIGDQYADLFLAAKNLSDAILLSDILRVNTEITKAPLSASMIKRYDEHHQDLTLLKALVRQQLPEKYKEIFFDQSKNGYAGYIDGGASQEEFYKFIKPILEKMDGTEELLVKLNREDLLRKQRTFDNGSIPHQIHLGELHAILRRQEDFYPFLKDNREKIEKILTFRIPYYVGPLARGNSRFAWMTRKSEETITPWNFEEVVDKGASAQSFIERMTNFDKNLPNEKVLPKHSLLYEYFTVYNELTKVKYVTEGMRKPAFLSGEQKKAIVDLLFKTNRKVTVKQLKEDYFKKIECFDSVEISGVEDRFNASLGTYHDLLKIIKDKDFLDNEENEDILEDIVLTLTLFEDREMIEERLKTYAHLFDDKVMKQLKRRRYTGWGRLSRKLINGIRDKQSGKTILDFLKSDGFANRNFMQLIHDDSLTFKEDIQKAQVSGQGDSLHEHIANLAGSPAIKKGILQTVKVVDELVKVMGRHKPENIVIEMARENQTTQKGQKNSRERMKRIEEGIKELGSQILKEHPVENTQLQNEKLYLYYLQNGRDMYVDQELDINRLSDYDVDHIVPQSFLKDDSIDNKVLTRSDKNRGKSDNVPSEEVVKKMKNYWRQLLNAKLITQRKFDNLTKAERGGLSELDKAGFIKRQLVETRQITKHVAQILDSRMNTKYDENDKLIREVKVITLKSKLVSDFRKDFQFYKVREINNYHHAHDAYLNAVVGTALIKKYPKLESEFVYGDYKVYDVRKMIAKSEQEIGKATAKYFFYSMNHRVEITEGILADECAALLCYFFRMPRQVFNAQKKAQSSTDGSSGSETPGTSESATPESSGSEVEFSHEYWMRHALTLAKRARDEREVPVGAVLVLNNRVIGEGWNRAIGLHDPTAHAEIMALRQGGLVMQNYRLIDATLYVTFEPCVMCAGAMIHSRIGRVVFGVRNAKTGAAGSLMDVLHYPGNIMNFFKTEITLANGEIRKRPLIETNGETGEIVWDKGRDFATVRKVLSMPQVNIVKKTEVQTGGFSKESILPKRNSDKLIARKKDWDPKKYGGFDSPTVAYSVLVVAKVEKGKSKKLKSVKELLGITIMERSSFEKNPIDFLEAKGYKEVKKDLIIKLPKYSLFELENGRKRMLASAGELQKGNELALPSKYVNFLYLASHYEKLKGSPEDNEQKQLFVEQHKHYLDEIIEQISEFSKRVILADANLDKVLSAYNKHRDKPIREQAENIIHLFTLTNLGAPAAFKYFDTTIDRKRYTSTKEVLDATLIHQSITGLYETRIDLSQLGGD

SEQ ID NO: 1351 - protein, 1554 aa, synthetic construct
  REGION 1..1554: note = Description of Artificial Sequence: Synthetic polypeptide
MDKKYSIGLAIGTNSVGWAVITDEYKVPSKKFKVLGNTDRHSIKKNLIGALLFDSGETAEATRLKRTARRRYTRRKNRICYLQEIFSNEMAKVDDSFFHRLEESFLVEEDKKHERHPIFGNIVDEVAYHEKYPTIYHLRKKLVDSTDKADLRLIYLALAHMIKFRGHFLIEGDLNPDNSDVDKLFIQLVQTYNQLFEENPINASGVDAKAILSARLSKSRRLENLIAQLPGEKKNGLFGNLIALSLGLTPNFKSNFDLAEDAKLQLSKDTYDDDLDNLLAQIGDQYADLFLAAKNLSDAILLSDILRVNTEITKAPLSASMIKRYDEHHQDLTLLKALVRQQLPEKYKEIFFDQSKNGYAGYIDGGASQEEFYKFIKPILEKMDGTEELLVKLNREDLLRKQRTFDNGSIPHQIHLGELHAILRRQEDFYPFLKDNREKIEKILTFRIPYYVGPLARGNSRFAWMTRKSEETITPWNFEEVVDKGASAQSFIERMTNFDKNLPNEKVLPKHSLLYEYFTVYNELTKVKYVTEGMRKPAFLSGEQKKAIVDLLFKTNRKVTVKQLKEDYFKKIECFDSVEISGVEDRFNASLGTYHDLLKIIKDKDFLDNEENEDILEDIVLTLTLFEDREMIEERLKTYAHLFDDKVMKQLKRRRYTGWGRLSRKLINGIRDKQSGKTILDFLKSDGFANRNFMQLIHDDSLTFKEDIQKAQVSGQGDSLHEHIANLAGSPAIKKGILQTVKVVDELVKVMGRHKPENIVIEMARENQTTQKGQKNSRERMKRIEEGIKELGSQILKEHPVENTQLQNEKLYLYYLQNGRDMYVDQELDINRLSDYDVDHIVPQSFLKDDSIDNKVLTRSDKNRGKSDNVPSEEVVKKMKNYWRQLLNAKLITQRKFDNLTKAERGGLSELDKAGFIKRQLVETRQITKHVAQILDSRMNTKYDENDKLIREVKVITLKSKLVSDFRKDFQFYKVREINNYHHAHDAYLNAVVGTALIKKYPKLESEFVYGDYKVYDVRKMIAKSEQEIGKATAKYFFYSNIMNFFKTEITLANGEIRKRPLIETNGETGEIVWDKGRDFATVRKVLSMPQVNIVKKTEVQTGGFSKESILPKRNSDKLIARKKDWDPKKYGGFDSPTVAYSVLVVAKVEKGKSKKLKSVKELLGITIMERSSFEKNPIDFLEAKGYKEVKKDLIIKLPKYSLFELENGRKRMLASAGELQKGNELALPSKYVNFLYLASHYEKLKGSPEDNEQKQLFVEQHKHYLDEIIEQISEFSKRVILADANLDKVLSAYNKHRMNHRVEITEGILADECAALLCYFFRMPRQVFNAQKKAQSSTDGSSGSETPGTSESATPESSGSEVEFSHEYWMRHALTLAKRARDEREVPVGAVLVLNNRVIGEGWNRAIGLHDPTAHAEIMALRQGGLVMQNYRLIDATLYVTFEPCVMCAGAMIHSRIGRVVFGVRNAKTGAAGSLMDVLHYPGDKPIREQAENIIHLFTLTNLGAPAAFKYFDTTIDRKRYTSTKEVLDATLIHQSITGLYETRIDLSQLGGD

SEQ ID NO: 1352 - protein, 1454 aa, synthetic construct
  REGION 1..1454: note = Description of Artificial Sequence: Synthetic polypeptide
MDKKYSIGLAIGTNSVGWAVITDEYKVPSKKFKVLGNTDRHSIKKNLIGALLFDSGETAEATRLKRTARRRYTRRKNRICYLQEIFSNEMAKVDDSFFHRLEESFLVEEDKKHERHPIFGNIVDEVAYHEKYPTIYHLRKKLVDSTDKADLRLIYLALAHMIKFRGHFLIEGDLNPDNSDVDKLFIQLVQTYNQLFEENPINASGVDAKAILSARLSKSRRLENLIAQLPGEKKNGLFGNLIALSLGLTPNFKSNFDLAEDAKLQLSKDTYDDDLDNLLAQIGDQYADLFLAAKNLSDAILLSDILRVNTEITKAPLSASMIKRYDEHHQDLTLLKALVRQQLPEKYKEIFFDQSKNGYAGYIDGGASQEEFYKFIKPILEKMDGTEELLVKLNREDLLRKQRTFDNGSIPHQIHLGELHAILRRQEDFYPFLKDNREKIEKILTFRIPYYVGPLARGNSRFAWMTRKSEETITPWNFEEVVDKGASAQSFIERMTNFDKNLPNEKVLPKHSLLYEYFTVYNELTKVKYVTEGMRKPAFLSGEQKKAIVDLLFKTNRKVTVKQLKEDYFKKIECFDSVEISGVEDRFNASLGTYHDLLKIIKDKDFLDNEENEDILEDIVLTLTLFEDREMIEERLKTYAHLFDDKVMKQLKRRRYTGWGRLSRKLINGIRDKQSGKTILDFLKSDGFANRNFMQLIHDDSLTFKEDIQKAQVSGQGDSLHEHIANLAGSPAIKKGILQTVKVVDELVKVMGRHKPENIVIEMARENQTTQKGQKNSRERMKRIEEGIKELGSEVEFSHEYWMRHALTLAKRARDEREVPVGAVLVLNNRVIGEGWNRAIGLHDPTAHAEIMALRQGGLVMQNYRLIDATLYVTFEPCVMCAGAMIHSRIGRVVFGVRNAKTGAAGSLMDVLHYPGMNHRVEITEGILADECAALLCYFFRMPRQVFNAQKKAQSSTDEEVVKKMKNYWRQLLNAKLITQRKFDNLTKAERGGLSELDKAGFIKRQLVETRQITKHVAQILDSRMNTKYDENDKLIREVKVITLKSKLVSDFRKDFQFYKVREINNYHHAHDAYLNAVVGTALIKKYPKLESEFVYGDYKVYDVRKMIAKSEQEIGKATAKYFFYSNIMNFFKTEITLANGEIRKRPLIETNGETGEIVWDKGRDFATVRKVLSMPQVNIVKKTEVQTGGFSKESILPKRNSDKLIARKKDWDPKKYGGFDSPTVAYSVLVVAKVEKGKSKKLKSVKELLGITIMERSSFEKNPIDFLEAKGYKEVKKDLIIKLPKYSLFELENGRKRMLASAGELQKGNELALPSKYVNFLYLASHYEKLKGSPEDNEQKQLFVEQHKHYLDEIIEQISEFSKRVILADANLDKVLSAYNKHRDKPIREQAENIIHLFTLTNLGAPAAFKYFDTTIDRKRYTSTKEVLDATLIHQSITGLYETRIDLSQLGGD

SEQ ID NO: 1353 - protein, 1420 aa, synthetic construct
  REGION 1..1420: note = Description of Artificial Sequence: Synthetic polypeptide
MDKKYSIGLAIGTNSVGWAVITDEYKVPSKKFKVLGNTDRHSIKKNLIGALLFDSGETAEATRLKRTARRRYTRRKNRICYLQEIFSNEMAKVDDSFFHRLEESFLVEEDKKHERHPIFGNIVDEVAYHEKYPTIYHLRKKLVDSTDKADLRLIYLALAHMIKFRGHFLIEGDLNPDNSDVDKLFIQLVQTYNQLFEENPINASGVDAKAILSARLSKSRRLENLIAQLPGEKKNGLFGNLIALSLGLTPNFKSNFDLAEDAKLQLSKDTYDDDLDNLLAQIGDQYADLFLAAKNLSDAILLSDILRVNTEITKAPLSASMIKRYDEHHQDLTLLKALVRQQLPEKYKEIFFDQSKNGYAGYIDGGASQEEFYKFIKPILEKMDGTEELLVKLNREDLLRKQRTFDNGSIPHQIHLGELHAILRRQEDFYPFLKDNREKIEKILTFRIPYYVGPLARGNSRFAWMTRKSEETITPWNFEEVVDKGASAQSFIERMTNFDKNLPNEKVLPKHSLLYEYFTVYNELTKVKYVTEGMRKPAFLSGEQKKAIVDLLFKTNRKVTVKQLKEDYFKKIECFDSVEISGVEDRFNASLGTYHDLLKIIKDKDFLDNEENEDILEDIVLTLTLFEDREMIEERLKTYAHLFDDKVMKQLKRRRYTGWGRLSRKLINGIRDKQSGKTILDFLKSDGFANRNFMQLIHDDSLTFKEDIQKAQVSGQGDSLHEHIANLAGSPAIKKGILQTVKVVDELVKVMGRHKPENIVIEMARENQTTQKGQKNSRERMKRIEEGIKELGSEVEFSHEYWMRHALTLAKRARDEREVPVGAVLVLNNRVIGEGWNRAIGLHDPTAHAEIMALRQGGLVMQNYRLIDATLYVTFEPCVMCAGAMIHSRIGRVVFGVRNAKTGAAGSLMDVLHYPGMNHRVEITEGILADECAALLCYFFRMPRQVFNAQKKAQSSTDGLSELDKAGFIKRQLVETRQITKHVAQILDSRMNTKYDENDKLIREVKVITLKSKLVSDFRKDFQFYKVREINNYHHAHDAYLNAVVGTALIKKYPKLESEFVYGDYKVYDVRKMIAKSEQEIGKATAKYFFYSNIMNFFKTEITLANGEIRKRPLIETNGETGEIVWDKGRDFATVRKVLSMPQVNIVKKTEVQTGGFSKESILPKRNSDKLIARKKDWDPKKYGGFDSPTVAYSVLVVAKVEKGKSKKLKSVKELLGITIMERSSFEKNPIDFLEAKGYKEVKKDLIIKLPKYSLFELENGRKRMLASAGELQKGNELALPSKYVNFLYLASHYEKLKGSPEDNEQKQLFVEQHKHYLDEIIEQISEFSKRVILADANLDKVLSAYNKHRDKPIREQAENIIHLFTLTNLGAPAAFKYFDTTIDRKRYTSTKEVLDATLIHQSITGLYETRIDLSQLGGD

SEQ ID NO: 1354 - protein, 1554 aa, synthetic construct
  REGION 1..1554: note = Description of Artificial Sequence: Synthetic polypeptide
MDKKYSIGLAIGTNSVGWAVITDEYKVPSKKFKVLGNTDRHSIKKNLIGALLFDSGETAEATRLKRTARRRYTRRKNRICYLQEIFSNEMAKVDDSFFHRLEESFLVEEDKKHERHPIFGNIVDEVAYHEKYPTIYHLRKKLVDSTDKADLRLIYLALAHMIKFRGHFLIEGDLNPDNSDVDKLFIQLVQTYNQLFEENPINASGVDAKAILSARLSKSRRLENLIAQLPGEKKNGLFGNLIALSLGLTPNFKSNFDLAEDAKLQLSKDTYDDDLDNLLAQIGDQYADLFLAAKNLSDAILLSDILRVNTEITKAPLSASMIKRYDEHHQDLTLLKALVRQQLPEKYKEIFFDQSKNGYAGYIDGGASQEEFYKFIKPILEKMDGTEELLVKLNREDLLRKQRTFDNGSIPHQIHLGELHAILRRQEDFYPFLKDNREKIEKILTFRIPYYVGPLARGNSRFAWMTRKSEETITPWNFEEVVDKGASAQSFIERMTNFDKNLPNEKVLPKHSLLYEYFTVYNELTKVKYVTEGMRKPAFLSGEQKKAIVDLLFKTNRKVTVKQLKEDYFKKIECFDSVEISGVEDRFNASLGTYHDLLKIIKDKDFLDNEENEDILEDIVLTLTLFEDREMIEERLKTYAHLFDDKVMKQLKRRRYTGWGRLSRKLINGIRDKQSGKTILDFLKSDGFANRNFMQLIHDDSLTFKEDIQKAQVSGQGDSLHEHIANLAGSPAIKKGILQTVKVVDELVKVMGRHKPENIVIEMARENQTTQKGQKNSRERMKRIEEGIKELGSQILKEHPVENTQLQNEKLYLYYLQNGRDMYVDQELDINRLSDYDVDHIVPQSFLKDDSIDNKVLTRSDKNRGKSDNVPSEEVVKKMKNYWRQLLNAKLITQRKFDNLTKAERGGLSELDKAGFIKRQLVETRQITKHVAQILDSRMNTKYDENDKLIREVKVITLKSKLVSDFRKDFQFYKVREINNYHHAHDAYLNAVVGTALIKKYPKTAHAEIMALRQGGLVMQNYRLIDATLYVTFEPCVMCAGAMIHSRIGRVVFGVRNAKTGAAGSLMDVLHYPGMNHRVEITEGILADECAALLCYFFRMPRQVFNAQKKAQSSTDGSSGSETPGTSESATPESSGSEVEFSHEYWMRHALTLAKRARDEREVPVGAVLVLNNRVIGEGWNRAIGLHDPLESEFVYGDYKVYDVRKMIAKSEQEIGKATAKYFFYSNIMNFFKTEITLANGEIRKRPLIETNGETGEIVWDKGRDFATVRKVLSMPQVNIVKKTEVQTGGFSKESILPKRNSDKLIARKKDWDPKKYGGFDSPTVAYSVLVVAKVEKGKSKKLKSVKELLGITIMERSSFEKNPIDFLEAKGYKEVKKDLIIKLPKYSLFELENGRKRMLASAGELQKGNELALPSKYVNFLYLASHYEKLKGSPEDNEQKQLFVEQHKHYLDEIIEQISEFSKRVILADANLDKVLSAYNKHRDKPIREQAENIIHLFTLTNLGAPAAFKYFDTTIDRKRYTSTKEVLDATLIHQSITGLYETRIDLSQLGGD

SEQ ID NO: 1355 - protein, 1554 aa, synthetic construct
  REGION 1..1554: note = Description of Artificial Sequence: Synthetic polypeptide
MDKKYSIGLAIGTNSVGWAVITDEYKVPSKKFKVLGNTDRHSIKKNLIGALLFDSGETAEATRLKRTARRRYTRRKNRICYLQEIFSNEMAKVDDSFFHRLEESFLVEEDKKHERHPIFGNIVDEVAYHEKYPTIYHLRKKLVDSTDKADLRLIYLALAHMIKFRGHFLIEGDLNPDNSDVDKLFIQLVQTYNQLFEENPINASGVDAKAILSARLSKSRRLENLIAQLPGEKKNGLFGNLIALSLGLTPNFKSNFDLAEDAKLQLSKDTYDDDLDNLLAQIGDQYADLFLAAKNLSDAILLSDILRVNTEITKAPLSASMIKRYDEHHQDLTLLKALVRQQLPEKYKEIFFDQSKNGYAGYIDGGASQEEFYKFIKPILEKMDGTEELLVKLNREDLLRKQRTFDNGSIPHQIHLGELHAILRRQEDFYPFLKDNREKIEKILTFRIPYYVGPLARGNSRFAWMTRKSEETITPWNFEEVVDKGASAQSFIERMTNFDKNLPNEKVLPKHSLLYEYFTVYNELTKVKYVTEGMRKPAFLSGEQKKAIVDLLFKTNRKVTVKQLKEDYFKKIECFDSVEISGVEDRFNASLGTYHDLLKIIKDKDFLDNEENEDILEDIVLTLTLFEDREMIEERLKTYAHLFDDKVMKQLKRRRYTGWGRLSRKLINGIRDKQSGKTILDFLKSDGFANRNFMQLIHDDSLTFKEDIQKAQVSGQGDSLHEHIANLAGSPAIKKGILQTVKVVDELVKVMGRHKPENIVIEMARENQTTQKGQKNSRERMKRIEEGIKELGSQILKEHPVENTQLQNEKLYLYYLQNGRDMYVDQELDINRLSDYDVDHIVPQSFLKDDSIDNKVLTRSDKNRGKSDNVPSEEVVKKMKNYWRQLLNAKLITQRKFDNLTKAERGGLSELDKAGFIKRQLVETRQITKHVAQILDSRMNTKYDENDKLIREVKVITLKSKLVSDFRKDFQFYKVREINNYHHAHDAYLNAVVGTALIKKYPKLESEFVYGDYKVTAHAEIMALRQGGLVMQNYRLIDATLYVTFEPCVMCAGAMIHSRIGRVVFGVRNAKTGAAGSLMDVLHYPGMNHRVEITEGILADECAALLCYFFRMPRQVFNAQKKAQSSTDGSSGSETPGTSESATPESSGSEVEFSHEYWMRHALTLAKRARDEREVPVGAVLVLNNRVIGEGWNRAIGLHDPYDVRKMIAKSEQEIGKATAKYFFYSNIMNFFKTEITLANGEIRKRPLIETNGETGEIVWDKGRDFATVRKVLSMPQVNIVKKTEVQTGGFSKESILPKRNSDKLIARKKDWDPKKYGGFDSPTVAYSVLVVAKVEKGKSKKLKSVKELLGITIMERSSFEKNPIDFLEAKGYKEVKKDLIIKLPKYSLFELENGRKRMLASAGELQKGNELALPSKYVNFLYLASHYEKLKGSPEDNEQKQLFVEQHKHYLDEIIEQISEFSKRVILADANLDKVLSAYNKHRDKPIREQAENIIHLFTLTNLGAPAAFKYFDTTIDRKRYTSTKEVLDATLIHQSITGLYETRIDLSQLGGD

SEQ ID NO: 1356 - protein, 1554 aa, synthetic construct
  REGION 1..1554: note = Description of Artificial Sequence: Synthetic polypeptide
MDKKYSIGLAIGTNSVGWAVITDEYKVPSKKFKVLGNTDRHSIKKNLIGALLFDSGETAEATRLKRTARRRYTRRKNRICYLQEIFSNEMAKVDDSFFHRLEESFLVEEDKKHERHPIFGNIVDEVAYHEKYPTIYHLRKKLVDSTDKADLRLIYLALAHMIKFRGHFLIEGDLNPDNSDVDKLFIQLVQTYNQLFEENPINASGVDAKAILSARLSKSRRLENLIAQLPGEKKNGLFGNLIALSLGLTPNFKSNFDLAEDAKLQLSKDTYDDDLDNLLAQIGDQYADLFLAAKNLSDAILLSDILRVNTEITKAPLSASMIKRYDEHHQDLTLLKALVRQQLPEKYKEIFFDQSKNGYAGYIDGGASQEEFYKFIKPILEKMDGTEELLVKLNREDLLRKQRTFDNGSIPHQIHLGELHAILRRQEDFYPFLKDNREKIEKILTFRIPYYVGPLARGNSRFAWMTRKSEETITPWNFEEVVDKGASAQSFIERMTNFDKNLPNEKVLPKHSLLYEYFTVYNELTKVKYVTEGMRKPAFLSGEQKKAIVDLLFKTNRKVTVKQLKEDYFKKIECFDSVEISGVEDRFNASLGTYHDLLKIIKDKDFLDNEENEDILEDIVLTLTLFEDREMIEERLKTYAHLFDDKVMKQLKRRRYTGWGRLSRKLINGIRDKQSGKTILDFLKSDGFANRNFMQLIHDDSLTFKEDIQKAQVSGQGDSLHEHIANLAGSPAIKKGILQTVKVVDELVKVMGRHKPENIVIEMARENQTTQKGQKNSRERMKRIEEGIKELGSQILKEHPVENTQLQNEKLYLYYLQNGRDMYVDQELDINRLSDYDVDHIVPQSFLKDDSIDNKVLTRSDKNRGKSDNVPSEEVVKKMKNYWRQLLNAKLITQRKFDNLTKAERGGLSELDKAGFIKRQLVETRQITKHVAQILDSRMNTKYDENDKLIREVKVITLKSKLVSDFRKDFQFYKVREINNYHHAHDAYLNAVVGTALIKKYPKLESEFVYGDYKVYDVRKMITAHAEIMALRQGGLVMQNYRLIDATLYVTFEPCVMCAGAMIHSRIGRVVFGVRNAKTGAAGSLMDVLHYPGMNHRVEITEGILADECAALLCYFFRMPRQVFNAQKKAQSSTDGSSGSETPGTSESATPESSGSEVEFSHEYWMRHALTLAKRARDEREVPVGAVLVLNNRVIGEGWNRAIGLHDPAKSEQEIGKATAKYFFYSNIMNFFKTEITLANGEIRKRPLIETNGETGEIVWDKGRDFATVRKVLSMPQVNIVKKTEVQTGGFSKESILPKRNSDKLIARKKDWDPKKYGGFDSPTVAYSVLVVAKVEKGKSKKLKSVKELLGITIMERSSFEKNPIDFLEAKGYKEVKKDLIIKLPKYSLFELENGRKRMLASAGELQKGNELALPSKYVNFLYLASHYEKLKGSPEDNEQKQLFVEQHKHYLDEIIEQISEFSKRVILADANLDKVLSAYNKHRDKPIREQAENIIHLFTLTNLGAPAAFKYFDTTIDRKRYTSTKEVLDATLIHQSITGLYETRIDLSQLGGD

SEQ ID NO: 1357 - protein, 1554 aa, synthetic construct
  REGION 1..1554: note = Description of Artificial Sequence: Synthetic polypeptide
MDKKYSIGLAIGTNSVGWAVITDEYKVPSKKFKVLGNTDRHSIKKNLIGALLFDSGETAEATRLKRTARRRYTRRKNRICYLQEIFSNEMAKVDDSFFHRLEESFLVEEDKKHERHPIFGNIVDEVAYHEKYPTIYHLRKKLVDSTDKADLRLIYLALAHMIKFRGHFLIEGDLNPDNSDVDKLFIQLVQTYNQLFEENPINASGVDAKAILSARLSKSRRLENLIAQLPGEKKNGLFGNLIALSLGLTPNFKSNFDLAEDAKLQLSKDTYDDDLDNLLAQIGDQYADLFLAAKNLSDAILLSDILRVNTEITKAPLSASMIKRYDEHHQDLTLLKALVRQQLPEKYKEIFFDQSKNGYAGYIDGGASQEEFYKFIKPILEKMDGTEELLVKLNREDLLRKQRTFDNGSIPHQIHLGELHAILRRQEDFYPFLKDNREKIEKILTFRIPYYVGPLARGNSRFAWMTRKSEETITPWNFEEVVDKGASAQSFIERMTNFDKNLPNEKVLPKHSLLYEYFTVYNELTKVKYVTEGMRKPAFLSGEQKKAIVDLLFKTNRKVTVKQLKEDYFKKIECFDSVEISGVEDRFNASLGTYHDLLKIIKDKDFLDNEENEDILEDIVLTLTLFEDREMIEERLKTYAHLFDDKVMKQLKRRRYTGWGRLSRKLINGIRDKQSGKTILDFLKSDGFANRNFMQLIHDDSLTFKEDIQKAQVSGQGDSLHEHIANLAGSPAIKKGILQTVKVVDELVKVMGRHKPENIVIEMARENQTTQKGQKNSRERMKRIEEGIKELGSQILKEHPVENTQLQNEKLYLYYLQNGRDMYVDQELDINRLSDYDVDHIVPQSFLKDDSIDNKVLTRSDKNRGKSDNVPSEEVVKKMKNYWRQLLNAKLITQRKFDNLTKAERGGLSELDKAGFIKRQLVETRQITKHVAQILDSRMNTKYDENDKLIREVKVITLKSKLVSDFRKDFQFYKVREINNYHHAHDAYLNAVVGTALIKKYPKLESEFVYGDYKVYDVRKMIAKSEQEITAHAEIMALRQGGLVMQNYRLIDATLYVTFEPCVMCAGAMIHSRIGRVVFGVRNAKTGAAGSLMDVLHYPGMNHRVEITEGILADECAALLCYFFRMPRQVFNAQKKAQSSTDGSSGSETPGTSESATPESSGSEVEFSHEYWMRHALTLAKRARDEREVPVGAVLVLNNRVIGEGWNRAIGLHDPGKATAKYFFYSNIMNFFKTEITLANGEIRKRPLIETNGETGEIVWDKGRDFATVRKVLSMPQVNIVKKTEVQTGGFSKESILPKRNSDKLIARKKDWDPKKYGGFDSPTVAYSVLVVAKVEKGKSKKLKSVKELLGITIMERSSFEKNPIDFLEAKGYKEVKKDLIIKLPKYSLFELENGRKRMLASAGELQKGNELALPSKYVNFLYLASHYEKLKGSPEDNEQKQLFVEQHKHYLDEIIEQISEFSKRVILADANLDKVLSAYNKHRDKPIREQAENIIHLFTLTNLGAPAAFKYFDTTIDRKRYTSTKEVLDATLIHQSITGLYETRIDLSQLGGD

SEQ ID NO: 1358 - protein, 1554 aa, synthetic construct
  REGION 1..1554: note = Description of Artificial Sequence: Synthetic polypeptide
MDKKYSIGLAIGTNSVGWAVITDEYKVPSKKFKVLGNTDRHSIKKNLIGALLFDSGETAEATRLKRTARRRYTRRKNRICYLQEIFSNEMAKVDDSFFHRLEESFLVEEDKKHERHPIFGNIVDEVAYHEKYPTIYHLRKKLVDSTDKADLRLIYLALAHMIKFRGHFLIEGDLNPDNSDVDKLFIQLVQTYNQLFEENPINASGVDAKAILSARLSKSRRLENLIAQLPGEKKNGLFGNLIALSLGLTPNFKSNFDLAEDAKLQLSKDTYDDDLDNLLAQIGDQYADLFLAAKNLSDAILLSDILRVNTEITKAPLSASMIKRYDEHHQDLTLLKALVRQQLPEKYKEIFFDQSKNGYAGYIDGGASQEEFYKFIKPILEKMDGTEELLVKLNREDLLRKQRTFDNGSIPHQIHLGELHAILRRQEDFYPFLKDNREKIEKILTFRIPYYVGPLARGNSRFAWMTRKSEETITPWNFEEVVDKGASAQSFIERMTNFDKNLPNEKVLPKHSLLYEYFTVYNELTKVKYVTEGMRKPAFLSGEQKKAIVDLLFKTNRKVTVKQLKEDYFKKIECFDSVEISGVEDRFNASLGTYHDLLKIIKDKDFLDNEENEDILEDIVLTLTLFEDREMIEERLKTYAHLFDDKVMKQLKRRRYTGWGRLSRKLINGIRDKQSGKTILDFLKSDGFANRNFMQLIHDDSLTFKEDIQKAQVSGQGDSLHEHIANLAGSPAIKKGILQTVKVVDELVKVMGRHKPENIVIEMARENQTTQKGQKNSRERMKRIEEGIKELGSQILKEHPVENTQLQNEKLYLYYLQNGRDMYVDQELDINRLSDYDVDHIVPQSFLKDDSIDNKVLTRSDKNRGKSDNVPSEEVVKKMKNYWRQLLNAKLITQRKFDNLTKAERGGLSELDKAGFIKRQLVETRQITKHVAQILDSRMNTKYDENDKLIREVKVITLKSKLVSDFRKDFQFYKVREINNYHHAHDAYLNAVVGTALIKKYPKLESEFVYGDYKVYDVRKMIAKSEQEIGKATAKYFFYSTAHAEIMALRQGGLVMQNYRLIDATLYVTFEPCVMCAGAMIHSRIGRVVFGVRNAKTGAAGSLMDVLHYPGMNHRVEITEGILADECAALLCYFFRMPRQVFNAQKKAQSSTDGSSGSETPGTSESATPESSGSEVEFSHEYWMRHALTLAKRARDEREVPVGAVLVLNNRVIGEGWNRAIGLHDPNIMNFFKTEITLANGEIRKRPLIETNGETGEIVWDKGRDFATVRKVLSMPQVNIVKKTEVQTGGFSKESILPKRNSDKLIARKKDWDPKKYGGFDSPTVAYSVLVVAKVEKGKSKKLKSVKELLGITIMERSSFEKNPIDFLEAKGYKEVKKDLIIKLPKYSLFELENGRKRMLASAGELQKGNELALPSKYVNFLYLASHYEKLKGSPEDNEQKQLFVEQHKHYLDEIIEQISEFSKRVILADANLDKVLSAYNKHRDKPIREQAENIIHLFTLTNLGAPAAFKYFDTTIDRKRYTSTKEVLDATLIHQSITGLYETRIDLSQLGGD

SEQ ID NO: 1359 - protein, 1554 aa, synthetic construct
  REGION 1..1554: note = Description of Artificial Sequence: Synthetic polypeptide
MDKKYSIGLAIGTNSVGWAVITDEYKVPSKKFKVLGNTDRHSIKKNLIGALLFDSGETAEATRLKRTARRRYTRRKNRICYLQEIFSNEMAKVDDSFFHRLEESFLVEEDKKHERHPIFGNIVDEVAYHEKYPTIYHLRKKLVDSTDKADLRLIYLALAHMIKFRGHFLIEGDLNPDNSDVDKLFIQLVQTYNQLFEENPINASGVDAKAILSARLSKSRRLENLIAQLPGEKKNGLFGNLIALSLGLTPNFKSNFDLAEDAKLQLSKDTYDDDLDNLLAQIGDQYADLFLAAKNLSDAILLSDILRVNTEITKAPLSASMIKRYDEHHQDLTLLKALVRQQLPEKYKEIFFDQSKNGYAGYIDGGASQEEFYKFIKPILEKMDGTEELLVKLNREDLLRKQRTFDNGSIPHQIHLGELHAILRRQEDFYPFLKDNREKIEKILTFRIPYYVGPLARGNSRFAWMTRKSEETITPWNFEEVVDKGASAQSFIERMTNFDKNLPNEKVLPKHSLLYEYFTVYNELTKVKYVTEGMRKPAFLSGEQKKAIVDLLFKTNRKVTVKQLKEDYFKKIECFDSVEISGVEDRFNASLGTYHDLLKIIKDKDFLDNEENEDILEDIVLTLTLFEDREMIEERLKTYAHLFDDKVMKQLKRRRYTGWGRLSRKLINGIRDKQSGKTILDFLKSDGFANRNFMQLIHDDSLTFKEDIQKAQVSGQGDSLHEHIANLAGSPAIKKGILQTVKVVDELVKVMGRHKPENIVIEMARENQTTQKGQKNSRERMKRIEEGIKELGSQILKEHPVENTQLQNEKLYLYYLQNGRDMYVDQELDINRLSDYDVDHIVPQSFLKDDSIDNKVLTRSDKNRGKSDNVPSEEVVKKMKNYWRQLLNAKLITQRKFDNLTKAERGGLSELDKAGFIKRQLVETRQITKHVAQILDSRMNTKYDENDKLIREVKVITLKSKLVSDFRKDFQFYKVREINNYHHAHDAYLNAVVGTALIKKYPKLESEFVYGDYKVYDVRKMIAKSEQEIGKATAKYFFYSNIMNFFKTEITLANTAHAEIMALRQGGLVMQNYRLIDATLYVTFEPCVMCAGAMIHSRIGRVVFGVRNAKTGAAGSLMDVLHYPGMNHRVEITEGILADECAALLCYFFRMPRQVFNAQKKAQSSTDGSSGSETPGTSESATPESSGSEVEFSHEYWMRHALTLAKRARDEREVPVGAVLVLNNRVIGEGWNRAIGLHDPGEIRKRPLIETNGETGEIVWDKGRDFATVRKVLSMPQVNIVKKTEVQTGGFSKESILPKRNSDKLIARKKDWDPKKYGGFDSPTVAYSVLVVAKVEKGKSKKLKSVKELLGITIMERSSFEKNPIDFLEAKGYKEVKKDLIIKLPKYSLFELENGRKRMLASAGELQKGNELALPSKYVNFLYLASHYEKLKGSPEDNEQKQLFVEQHKHYLDEIIEQISEFSKRVILADANLDKVLSAYNKHRDKPIREQAENIIHLFTLTNLGAPAAFKYFDTTIDRKRYTSTKEVLDATLIHQSITGLYETRIDLSQLGGD

SEQ ID NO: 1360 - protein, 1554 aa, synthetic construct
  REGION 1..1554: note = Description of Artificial Sequence: Synthetic polypeptide
MDKKYSIGLAIGTNSVGWAVITDEYKVPSKKFKVLGNTDRHSIKKNLIGALLFDSGETAEATRLKRTARRRYTRRKNRICYLQEIFSNEMAKVDDSFFHRLEESFLVEEDKKHERHPIFGNIVDEVAYHEKYPTIYHLRKKLVDSTDKADLRLIYLALAHMIKFRGHFLIEGDLNPDNSDVDKLFIQLVQTYNQLFEENPINASGVDAKAILSARLSKSRRLENLIAQLPGEKKNGLFGNLIALSLGLTPNFKSNFDLAEDAKLQLSKDTYDDDLDNLLAQIGDQYADLFLAAKNLSDAILLSDILRVNTEITKAPLSASMIKRYDEHHQDLTLLKALVRQQLPEKYKEIFFDQSKNGYAGYIDGGASQEEFYKFIKPILEKMDGTEELLVKLNREDLLRKQRTFDNGSIPHQIHLGELHAILRRQEDFYPFLKDNREKIEKILTFRIPYYVGPLARGNSRFAWMTRKSEETITPWNFEEVVDKGASAQSFIERMTNFDKNLPNEKVLPKHSLLYEYFTVYNELTKVKYVTEGMRKPAFLSGEQKKAIVDLLFKTNRKVTVKQLKEDYFKKIECFDSVEISGVEDRFNASLGTYHDLLKIIKDKDFLDNEENEDILEDIVLTLTLFEDREMIEERLKTYAHLFDDKVMKQLKRRRYTGWGRLSRKLINGIRDKQSGKTILDFLKSDGFANRNFMQLIHDDSLTFKEDIQKAQVSGQGDSLHEHIANLAGSPAIKKGILQTVKVVDELVKVMGRHKPENIVIEMARENQTTQKGQKNSRERMKRIEEGIKELGSQILKEHPVENTQLQNEKLYLYYLQNGRDMYVDQELDINRLSDYDVDHIVPQSFLKDDSIDNKVLTRSDKNRGKSDNVPSEEVVKKMKNYWRQLLNAKLITQRKFDNLTKAERGGLSELDKAGFIKRQLVETRQITKHVAQILDSRMNTKYDENDKLIREVKVITLKSKLVSDFRKDFQFYKVREINNYHHAHDAYLNAVVGTALIKKYPKLESEFVYGDYKVYDVRKMIAKSEQEIGKATAKYFFYSNIMNFFKTEITLANGEIRKRPLIETNGETGEIVWDKGRDFATVRKVLSMPQVNIVKKTEVQTGGFSKESILPKRNSDKLIARKKDWDPKKYGGFDSPTVAYSVLVVAKVEKGKSKKLKSVKELLGITIMERSSFEKNPIDFLEAKGYKEVKKDLIIKLPKYSLFELENGRKRMLASAGELQKGNELALPSKYVNFLYLASHYEKLKGTAHAEIMALRQGGLVMQNYRLIDATLYVTFEPCVMCAGAMIHSRIGRVVFGVRNAKTGAAGSLMDVLHYPGMNHRVEITEGILADECAALLCYFFRMPRQVFNAQKKAQSSTDGSSGSETPGTSESATPESSGSEVEFSHEYWMRHALTLAKRARDEREVPVGAVLVLNNRVIGEGWNRAIGLHDPSPEDNEQKQLFVEQHKHYLDEIIEQISEFSKRVILADANLDKVLSAYNKHRDKPIREQAENIIHLFTLTNLGAPAAFKYFDTTIDRKRYTSTKEVLDATLIHQSITGLYETRIDLSQLGGD

SEQ ID NO: 1361-1362 - skipped (2 entries)

SEQ ID NO: 1363 - protein, 160 aa, unidentified
  REGION 1..160: note = Description of Unknown: TadA polypeptide sequence
MGSHMTNDIYFMTLAIEEAKKAAQLGEVPIGAIITKDDEVIARAHNLRETLQQPTAHAEHIAIERAAKVLGSWRLEGCTLYVTLEPCVMCAGTIVMSRIPRVVYGADDPKGGCSGSLMNLLQQSNFNHRAIVDKGVLKEACSTLLTTFFKNLRANKKSTN

SEQ ID NO: 1364 - protein, 161 aa, unidentified
  REGION 1..161: note = Description of Unknown: TadA polypeptide sequence
MTQDELYMKEAIKEAKKAEEKGEVPIGAVLVINGEIIARAHNLRETEQRSIAHAEMLVIDEACKALGTWRLEGATLYVTLEPCPMCAGAVVLSRVEKVVFGAFDPKGGCSGTLMNLLQEERFNHQAEVVSGVLEEECGGMLSAFFRELRKKKKAARKNLSE

SEQ ID NO: 1365 - protein, 183 aa, unidentified
  REGION 1..183: note = Description of Unknown: TadA polypeptide sequence
MPPAFITGVTSLSDVELDHEYWMRHALTLAKRAWDEREVPVGAVLVHNHRVIGEGWNRPIGRHDPTAHAEIMALRQGGLVLQNYRLLDTTLYVTLEPCVMCAGAMVHSRIGRVVFGARDAKTGAAGSLIDVLHHPGMNHRVEIIEGVLRDECATLLSDFFRMRRQEIKALKKADRAEGAGPAV

SEQ ID NO: 1366 - protein, 164 aa, unidentified
  REGION 1..164: note = Description of Unknown: TadA polypeptide sequence
MDEYWMQVAMQMAEKAEAAGEVPVGAVLVKDGQQIATGYNLSISQHDPTAHAEILCLRSAGKKLENYRLLDATLYITLEPCAMCAGAMVHSRIARVVYGARDEKTGAAGTVVNLLQHPAFNHQVEVTSGVLAEACSAQLSRFFKRRRDEKKALKLAQRAQQGIE

SEQ ID NO: 1367 - protein, 173 aa, unidentified
  REGION 1..173: note = Description of Unknown: TadA polypeptide sequence
MDAAKVRSEFDEKMMRYALELADKAEALGEIPVGAVLVDDARNIIGEGWNLSIVQSDPTAHAEIIALRNGAKNIQNYRLLNSTLYVTLEPCTMCAGAILHSRIKRLVFGASDYKTGAIGSRFHFFDDYKMNHTLEITSGVLAEECSQKLSTFFQKRREEKKIEKALLKSLSDK

SEQ ID NO: 1368 - protein, 161 aa, unidentified
  REGION 1..161: note = Description of Unknown: TadA polypeptide sequence
MRTDESEDQDHRMMRLALDAARAAAEAGETPVGAVILDPSTGEVIATAGNGPIAAHDPTAHAEIAAMRAAAAKLGNYRLTDLTLVVTLEPCAMCAGAISHARIGRVVFGADDPKGGAVVHGPKFFAQPTCHWRPEVTGGVLADESADLLRGFFRARRKAKI

SEQ ID NO: 1369 - protein, 179 aa, unidentified
  REGION 1..179: note = Description of Unknown: TadA polypeptide sequence
MSSLKKTPIRDDAYWMGKAIREAAKAAARDEVPIGAVIVRDGAVIGRGHNLREGSNDPSAHAEMIAIRQAARRSANWRLTGATLYVTLEPCLMCMGAIILARLERVVFGCYDPKGGAAGSLYDLSADPRLNHQVRLSPGVCQEECGTMLSDFFRDLRRRKKAKATPALFIDERKVPPEP

SEQ ID NO: 1370 - protein, 167 aa, Escherichia coli; identical to SEQ ID NO: 8

SEQ ID NO: 1371-1372 - skipped (2 entries)

SEQ ID NO: 1373 - protein, 198 aa, Mus musculus
MDSLLMKQKKFLYHFKNVRWAKGRHETYLCYVVKRRDSATSCSLDFGHLRNKSGCHVELLFLRYISDWDLDPGRCYRVTWFTSWSPCYDCARHVAEFLRWNPNLSLRIFTARLYFCEDRKAEPEGLRRLHRAGVQIGIMTFKDYFYCWNTFVENRERTFKAWEGLHENSVRLTRQLRRILLPLYEVDDLRDAFRMLGF

SEQ ID NO: 1374 - protein, 198 aa, Canis lupus
MDSLLMKQRKFLYHFKNVRWAKGRHETYLCYVVKRRDSATSFSLDFGHLRNKSGCHVELLFLRYISDWDLDPGRCYRVTWFTSWSPCYDCARHVADFLRGYPNLSLRIFAARLYFCEDRKAEPEGLRRLHRAGVQIAIMTFKDYFYCWNTFVENREKTFKAWEGLHENSVRLSRQLRRILLPLYEVDDLRDAFRTLGL

SEQ ID NO: 1375 - protein, 199 aa, Bos taurus
MDSLLKKQRQFLYQFKNVRWAKGRHETYLCYVVKRRDSPTSFSLDFGHLRNKAGCHVELLFLRYISDWDLDPGRCYRVTWFTSWSPCYDCARHVADFLRGYPNLSLRIFTARLYFCDKERKAEPEGLRRLHRAGVQIAIMTFKDYFYCWNTFVENHERTFKAWEGLHENSVRLSRQLRRILLPLYEVDDLRDAFRTLGL

SEQ ID NO: 1376 - protein, 239 aa, Rattus norvegicus
MAVGSKPKAALVGPHWERERIWCFLCSTGLGTQQTGQTSRWLRPAATQDPVSPPRSLLMKQRKFLYHFKNVRWAKGRHETYLCYVVKRRDSATSFSLDFGYLRNKSGCHVELLFLRYISDWDLDPGRCYRVTWFTSWSPCYDCARHVADFLRGNPNLSLRIFTARLTGWGALPAGLMSPARPSDYFYCWNTFVENHERTFKAWEGLHENSVRLSRRLRRILLPLYEVDDLRDAFRTLGL

SEQ ID NO: 1377 - protein, 198 aa, Mus musculus [sequence omitted]

SEQ ID NO: 1378 - protein, 229 aa, Rattus norvegicus [sequence omitted]

SEQ ID NO: 1379 - protein, 229 aa, Mesocricetus auratus
MSSETGPVVVDPTLRRRIEPHEFDAFFDQGELRKETCLLYEIRWGGRHNIWRHTGQNTSRHVEINFIEKFTSERYFYPSTRCSIVWFLSWSPCGECSKAITEFLSGHPNVTLFIYAARLYHHTDQRNRQGLRDLISRGVTIRIMTEQEYCYCWRNFVNYPPSNEVYWPRYPNLWMRLYALELYCIHLGLPPCLKIKRRHQYPLTFFRLNLQSCHYQRIPPHILWATGFI

SEQ ID NO: 1380 - protein, 236 aa, Pongo pygmaeus
MTSEKGPSTGDPTLRRRIESWEFDVFYDPRELRKETCLLYEIKWGMSRKIWRSSGKNTTNHVEVNFIKKFTSERRFHSSISCSITWFLSWSPCWECSQAIREFLSQHPGVTLVIYVARLFWHMDQRNRQGLRDLVNSGVTIQIMRASEYYHCWRNFVNYPPGDEAHWPQYPPLWMMLYALELHCIILSLPPCLKISRRWQNHLAFFRLHLQNCHYQTIPPHILLATGLIHPSVTWR

SEQ ID NO: 1381 - protein, 236 aa, Oryctolagus cuniculus
MASEKGPSNKDYTLRRRIEPWEFEVFFDPQELRKEACLLYEIKWGASSKTWRSSGKNTTNHVEVNFLEKLTSEGRLGPSTCCSITWFLSWSPCWECSMAIREFLSQHPGVTLIIFVARLFQHMDRRNRQGLKDLVTSGVTVRVMSVSEYCYCWENFVNYPPGKAAQWPRYPPRWMLMYALELYCIILGLPPCLKISRRHQKQLTFFSLTPQYCHYKMIPPYILLATGLLQPSVPWR

SEQ ID NO: 1382 - protein, 235 aa, Monodelphis domestica
MNSKTGPSVGDATLRRRIKPWEFVAFFNPQELRKETCLLYEIKWGNQNIWRHSNQNTSQHAEINFMEKFTAERHFNSSVRCSITWFLSWSPCWECSKAIRKFLDHYPNVTLAIFISRLYWHMDQQHRQGLKELVHSGVTIQIMSYSEYHYCWRNFVDYPQGEEDYWPKYPYLWIMLYVLELHCIILGLPPCLKISGSHSNQLALFSLDLQDCHYQKIPYNVLVATGLVQPFVTWR

SEQ ID NO: 1383 - protein, 224 aa, Pongo pygmaeus
MAQKEEAAAATEAASQNGEDLENLDDPEKLKELIELPPFEIVTGERLPANFFKFQFRNVEYSSGRNKTFLCYVVEAQGKGGQVQASRGYLEDEHAAAHAEEAFFNTILPAFDPALRYNVTWYVSSSPCAACADRIIKTLSKTKNLRLLILVGRLFMWEELEIQDALKKLKEAGCKLRIMKPQDFEYVWQNFVEQEEGESKAFQPWEDIQENFLYYEEKLADILK

SEQ ID NO: 1384 - protein, 224 aa, Bos taurus
MAQKEEAAAAAEPASQNGEEVENLEDPEKLKELIELPPFEIVTGERLPAHYFKFQFRNVEYSSGRNKTFLCYVVEAQSKGGQVQASRGYLEDEHATNHAEEAFFNSIMPTFDPALRYMVTWYVSSSPCAACADRIVKTLNKTKNLRLLILVGRLFMWEEPEIQAALRKLKEAGCRLRIMKPQDFEYIWQNFVEQEEGESKAFEPWEDIQENFLYYEEKLADILK

SEQ ID NO: 1385 - protein, 440 aa, Mus musculus
MQPQRLGPRAGMGPFCLGCSHRKCYSPIRNLISQETFKFHFKNLGYAKGRKDTFLCYEVTRKDCDSPVSLHHGVFKNKDNIHAEICFLYWFHDKVLKVLSPREEFKITWYMSWSPCFECAEQIVRFLATHHNLSLDIFSSRLYNVQDPETQQNLCRLVQEGAQVAAMDLYEFKKCWKKFVDNGGRRFRPWKRLLTNFRYQDSKLQEILRPCYISVPSSSSSTLSNICLTKGLPETRFWVEGRRMDPLSEEEFYSQFYNQRVKHLCYYHRMKPYLCYQLEQFNGQAPLKGCLLSEKGKQHAEILFLDKIRSMELSQVTITCYLTWSPCPNCAWQLAAFKRDRPDLILHIYTSRLYFHWKRPFQKGLCSLWQSGILVDVMDLPQFTDCWTNFVNPKRPFWPWKGLEIISRRTQRRLRRIKESWGLQDLVNDFGNLQLGPPMS

SEQ ID NO: 1386 - protein, 429 aa, Mus musculus
MGPFCLGCSHRKCYSPIRNLISQETFKFHFKNLGYAKGRKDTFLCYEVTRKDCDSPVSLHHGVFKNKDNIHAEICFLYWFHDKVLKVLSPREEFKITWYMSWSPCFECAEQIVRFLATHHNLSLDIFSSRLYNVQDPETQQNLCRLVQEGAQVAAMDLYEFKKCWKKFVDNGGRRFRPWKRLLTNFRYQDSKLQEILRPCYIPVPSSSSSTLSNICLTKGLPETRFCVEGRRMDPLSEEEFYSQFYNQRVKHLCYYHRMKPYLCYQLEQFNGQAPLKGCLLSEKGKQHAEILFLDKIRSMELSQVTITCYLTWSPCPNCAWQLAAFKRDRPDLILHIYTSRLYFHWKRPFQKGLCSLWQSGILVDVMDLPQFTDCWTNFVNPKRPFWPWKGLEIISRRTQRRLRRIKESWGLQDLVNDFGNLQLGPPMS

SEQ ID NO: 1387 - protein, 430 aa, unidentified
  REGION 1..430: note = Description of Unknown: APOBEC-3 polypeptide sequence
MGPFCLGCSHRKCYSPIRNLISQETFKFHFKNRLRYAIDRKDTFLCYEVTRKDCDSPVSLHHGVFKNKDNIHAEICFLYWFHDKVLKVLSPREEFKITWYMSWSPCFECAEQVLRFLATHHNLSLDIFSSRLYNIRDPENQQNLCRLVQEGAQVAAMDLYEFKKCWKKFVDNGGRRFRPWKKLLTNFRYQDSKLQEILRPCYIPVPSSSSSTLSNICLTKGLPETRFCVERRRVHLLSEEEFYSQFYNQRVKHLCYYHGVKPYLCYQLEQFNGQAPLKGCLLSEKGKQHAEILFLDKIRSMELSQVIITCYLTWSPCPNCAWQLAAFKRDRPDLILHIYTSRLYFHWKRPFQKGLCSLWQSGILVDVMDLPQFTDCWTNFVNPKRPFWPWKGLEIISRRTQRRLHRIKESWGLQDLVNDFGNLQLGPPMS

SEQ ID NO: 1388 - protein, 199 aa, Homo sapiens
MEASPASGPRHLMDPHIFTSNFNNGIGRHKTYLCYEVERLDNGTSVKMDQHRGFLHNQAKNLLCGFYGRHAELRFLDLVPSLQLDPAQIYRVTWFISWSPCFSWGCAGEVRAFLQENTHVRLRIFAARIYDYDPLYKEALQMLRDAGAQVSIMTYDEFKHCWDTFVDHQGCPFQPWDGLDEHSQALSGRLRAILQNQGN

SEQ ID NO: 1389 - protein, 373 aa, Homo sapiens
MKPHFRNTVERMYRDTFSYNFYNRPILSRRNTVWLCYEVKTKGPSRPRLDAKIFRGQVYSQPEHHAEMCFLSWFCGNQLPAYKCFQITWFVSWTPCPDCVAKLAEFLAEHPNVTLTISAARLYYYWERDYRRALCRLSQAGARVKIMDDEEFAYCWENFVYSEGQPFMPWYKFDDNYAFLHRTLKEILRNPMEAMYPHIFYFHFKNLRKAYGRNESWLCFTMEVVKHHSPVSWKRGVFRNQVDPETHCHAERCFLSWFCDDILSPNTNYEVTWYTSWSPCPECAGEVAEFLARHSNVNLTIFTARLYYFWDTDYQEGLRSLSQEGASVEIMGYKDFKYCWENFVYNDDEPFKPWKGLKYNFLFLDSKLQEILE

SEQ ID NO: 1390 - protein, 370 aa, Macaca mulatta
MVEPMDPRTFVSNFNNRPILSGLNTVWLCCEVKTKDPSGPPLDAKIFQGKVYSKAKYHPEMRFLRWFHKWRQLHHDQEYKVTWYVSWSPCTRCANSVATFLAKDPKVTLTIFVARLYYFWKPDYQQALRILCQKRGGPHATMKIMNYNEFQDCWNKFVDGRGKPFKPRNNLPKHYTLLQATLGELLRHLMDPGTFTSNFNNKPWVSGQHETYLCYKVERLHNDTWVPLNQHRGFLRNQAPNIHGFPKGRHAELCFLDLIPFWKLDGQQYRVTCFTSWSPCFSCAQEMAKFISNNEHVSLCIFAARIYDDQGRYQEGLRALHRDGAKIAMMNYSEFEYCWDTFVDRQGRPFQPWDGLDEHSQALSGRLRAI

SEQ ID NO: 1391 - protein, 384 aa, Pan troglodytes
MKPHFRNPVERMYQDTFSDNFYNRPILSHRNTVWLCYEVKTKGPSRPPLDAKIFRGQVYSKLKYHPEMRFFHWFSKWRKLHRDQEYEVTWYISWSPCTKCTRDVATFLAEDPKVTLTIFVARLYYFWDPDYQEALRSLCQKRDGPRATMKIMNYDEFQHCWSKFVYSQRELFEPWNNLPKYYILLHIMLGEILRHSMDPPTFTSNFNNELWVRGRHETYLCYEVERLHNDTWVLLNQRRGFLCNQAPHKHGFLEGRHAELCFLDVIPFWKLDLHQDYRVTCFTSWSPCFSCAQEMAKFISNNKHVSLCIFAARIYDDQGRCQEGLRTLAKAGAKISIMTYSEFKHCWDTFVDHQGCPFQPWDGLEEHSQALSGRLRAILQNQGN

SEQ ID NO: 1392 - protein, 377 aa, Chlorocebus sabaeus
MNPQIRNMVEQMEPDIFVYYFNNRPILSGRNTVWLCYEVKTKDPSGPPLDANIFQGKLYPEAKDHPEMKFLHWFRKWRQLHRDQEYEVTWYVSWSPCTRCANSVATFLAEDPKVTLTIFVARLYYFWKPDYQQALRILCQERGGPHATMKIMNYNEFQHCWNEFVDGQGKPFKPRKNLPKHYTLLHATLGELLRHVMDPGTFTSNFNNKPWVSGQRETYLCYKVERSHNDTWVLLNQHRGFLRNQAPDRHGFPKGRHAELCFLDLIPFWKLDDQQYRVTCFTSWSPCFSCAQKMAKFISNNKHVSLCIFAARIYDDQGRCQEGLRTLHRDGAKIAVMNYSEFEYCWDTFVDRQGRPFQPWDGLDEHSQALSGRLRAI

SEQ ID NO: 1393 - protein, 384 aa, Homo sapiens
MKPHFRNTVERMYRDTFSYNFYNRPILSRRNTVWLCYEVKTKGPSRPPLDAKIFRGQVYSELKYHPEMRFFHWFSKWRKLHRDQEYEVTWYISWSPCTKCTRDMATFLAEDPKVTLTIFVARLYYFWDPDYQEALRSLCQKRDGPRATMKIMNYDEFQHCWSKFVYSQRELFEPWNNLPKYYILLHIMLGEILRHSMDPPTFTFNFNNEPWVRGRHETYLCYEVERMHNDTWVLLNQRRGFLCNQAPHKHGFLEGRHAELCFLDVIPFWKLDLDQDYRVTCFTSWSPCFSCAQEMAKFISKNKHVSLCIFTARIYDDQGRCQEGLRTLAEAGAKISIMTYSEFKHCWDTFVDHQGCPFQPWDGLDEHSQDLSGRLRAILQNQEN

SEQ ID NO: 1394 - protein, 382 aa, Homo sapiens
MNPQIRNPMERMYRDTFYDNFENEPILYGRSYTWLCYEVKIKRGRSNLLWDTGVFRGQVYFKPQYHAEMCFLSWFCGNQLPAYKCFQITWFVSWTPCPDCVAKLAEFLSEHPNVTLTISAARLYYYWERDYRRALCRLSQAGARVTIMDYEEFAYCWENFVYNEGQQFMPWYKFDENYAFLHRTLKEILRYLMDPDTFTFNFNNDPLVLRRRQTYLCYEVERLDNGTWVLMDQHMGFLCNEAKNLLCGFYGRHAELRFLDLVPSLQLDPAQIYRVTWFISWSPCFSWGCAGEVRAFLQENTHVRLRIFAARIYDYDPLYKEALQMLRDAGAQVSIMTYDEFEYCWDTFVYRQGCPFQPWDGLEEHSQALSGRLRAILQNQGN

SEQ ID NO: 1395 - protein, 395 aa, Rattus norvegicus
MQPQGLGPNAGMGPVCLGCSHRRPYSPIRNPLKKLYQQTFYFHFKNVRYAWGRKNNFLCYEVNGMDCALPVPLRQGVFRKQGHIHAELCFIYWFHDKVLRVLSPMEEFKVTWYMSWSPCSKCAEQVARFLAAHRNLSLAIFSSRLYYYLRNPNYQQKLCRLIQEGVHVAAMDLPEFKKCWNKFVDNDGQPFRPWMRLRINFSFYDCKLQEIFSRMNLLREDVFYLQFNNSHRVKPVQNRYYRRKSYLCYQLERANGQEPLKGYLLYKKGEQHVEILFLEKMRSMELSQVRITCYLTWSPCPNCARQLAAFKKDHPDLILRIYTSRLYFWRKKFQKGLCTLWRSGIHVDVMDLPQFADCWTNFVNPQRPFRPWNELEKNSWRIQRRLRRIKESWGL

SEQ ID NO: 1396 - protein, 226 aa, Bos taurus
DGWEVAFRSGTVLKAGVLGVSMTEGWAGSGHPGQGACVWTPGTRNTMNLLREVLFKQQFGNQPRVPAPYYRRKTYLCYQLKQRNDLTLDRGCFRNKKQRHAERFIDKINSLDLNPSQSYKIICYITWSPCPNCANELVNFITRNNHLKLEIFASRLYFHWIKSFKMGLQDLQNAGISVAVMTHTEFEDCWEQFVDNQSRPFQPWDKLEQYSASIRRRLQRILTAPI

SEQ ID NO: 1397 - protein, 490 aa, Pan troglodytes
MNPQIRNPMEWMYQRTFYYNFENEPILYGRSYTWLCYEVKIRRGHSNLLWDTGVFRGQMYSQPEHHAEMCFLSWFCGNQLSAYKCFQITWFVSWTPCPDCVAKLAKFLAEHPNVTLTISAARLYYYWERDYRRALCRLSQAGARVKIMDDEEFAYCWENFVYNEGQPFMPWYKFDDNYAFLHRTLKEIIRHLMDPDTFTFNFNNDPLVLRRHQTYLCYEVERLDNGTWVLMDQHMGFLCNEAKNLLCGFYGRHAELRFLDLVPSLQLDPAQIYRVTWFISWSPCFSWGCAGQVRAFLQENTHVRLRIFAARIYDYDPLYKEALQMLRDAGAQVSIMTYDEFEYCWDTFVYRQGCPFQPWDGLEEHSQALSGRLRAILQVRASSLCMVPHRPPPPPQSPGPCLPLCSEPPLGSLLPTGRPAPSLPFLLTASFSFPPPASLPPLPSLSLSPGHLPVPSFHSLTSCSIQPPCSSRIRETEGWASVSKEGRDLG

SEQ ID NO: 1398 - protein, 190 aa, Homo sapiens
MNPQIRNPMKAMYPGTFYFQFKNLWEANDRNETWLCFTVEGIKRRSVVSWKTGVFRNQVDSETHCHAERCFLSWFCDDILSPNTKYQVTWYTSWSPCPDCAGEVAEFLARHSNVNLTIFTARLYYFQYPCYQEGLRSLSQEGVAVEIMDYEDFKYCWENFVYNDNEPFKPWKGLKTNFRLLKRRLRESLQ

SEQ ID NO: 1399 - protein, 190 aa, Gorilla gorilla
MNPQIRNPMKAMYPGTFYFQFKNLWEANDRNETWLCFTVEGIKRRSVVSWKTGVFRNQVDSETHCHAERCFLSWECDDILSPNTNYQVTWYTSWSPCPECAGEVAEFLARHSNVNLTIFTARLYYFQDTDYQEGLRSLSQEGVAVKIMDYKDFKYCWENFVYNDDEPFKPWKGLKYNFRFLKRRLQEILE

SEQ ID NO: 1400 - protein, 202 aa, Macaca mulatta
MDGSPASRPRHLMDPNTFTFNFNNDLSVRGRHQTYLCYEVERLDNGTWVPMDERRGFLCNKAKNVPCGDYGCHVELRFLCEVPSWQLDPAQTYRVTWFISWSPCFRRGCAGQVRVFLQENKHVRLRIFAARIYDYDPLYQEALRTLRDAGAQVSIMTYEEFKHCWDTFVDRQGRPFQPWDGLDEHSQALSGRLRAILQNQGN

SEQ ID NO: 1401 - protein, 185 aa, Bos taurus
MDEYTFTENFNNQGWPSKTYLCYEMERLDGDATIPLDEYKGFVRNKGLDQPEKPCHAELYFLGKIHSWNLDRNQHYRLTCFISWSPCYDCAQKLTTFLKENHHISLHILASRIYTHNRFGCHQSGLCELQAAGARITIMTFEDFKHCWETFVDHKGKPFQPWEGLNVKSQALCTELQAILKTQQN

SEQ ID NO: 1402 - protein, 200 aa, Homo sapiens
MALLTAETFRLQFNNKRRLRRPYYPRKALLCYQLTPQNGSTPTRGYFENKKKCHAEICFINEIKSMGLDETQCYQVTCYLTWSPCSSCAWELVDFIKAHDHLNLGIFASRLYYHWCKPQQKGLRLLCGSQVPVEVMGFPKFADCWENFVDHEKPLSFNPYKMLEELDKNSRAIKRRLERIKIPGVRAQGRYMDILCDAEV

SEQ ID NO: 1403 - protein, 210 aa, Macaca mulatta
MALLTAKTFSLQFNNKRRVNKPYYPRKALLCYQLTPQNGSTPTRGHLKNKKKDHAEIRFINKIKSMGLDETQCYQVTCYLTWSPCPSCAGELVDFIKAHRHLNLRIFASRLYYHWRPNYQEGLLLLCGSQVPVEVMGLPEFTDCWENFVDHKEPPSFNPSEKLEELDKNSQAIKRRLERIKSRSVDVLENGLRSLQLGPVTPSSSIRNSR

SEQ ID NO: 1404 - protein, 386 aa, Homo sapiens
MNPQIRNPMERMYRDTFYDNFENEPILYGRSYTWLCYEVKIKRGRSNLLWDTGVFRGPVLPKRQSNHRQEVYFRFENHAEMCFLSWFCGNRLPANRRFQITWFVSWNPCLPCVVKVTKFLAEHPNVTLTISAARLYYYRDRDWRWVLLRLHKAGARVKIMDYEDFAYCWENFVCNEGQPFMPWYKFDDNYASLHRTLKEILRNPMEAMYPHIFYFHFKNLLKACGRNESWLCFTMEVTKHHSAVFRKRGVFRNQVDPETHCHAERCFLSWFCDDILSPNTNYEVTWYTSWSPCPECAGEVAEFLARHSNVNLTIFTARLCYFWDTDYQEGLCSLSQEGASVKIMGYKDFVSCWKNFVYSDDEPFKPWKGLQTNFRLLKRRLREILQ

SEQ ID NO: 1405 - protein, 236 aa, Homo sapiens
MTSEKGPSTGDPTLRRRIEPWEFDVFYDPRELRKEACLLYEIKWGMSRKIWRSSGKNTTNHVEVNFIKKFTSERDFHPSMSCSITWFLSWSPCWECSQAIREFLSRHPGVTLVIYVARLFWHMDQQNRQGLRDLVNSGVTIQIMRASEYYHCWRNFVNYPPGDEAHWPQYPPLWMMLYALELHCIILSLPPCLKISRRWQNHLTFFRLHLQNCHYQTIPPHILLATGLIHPSVAWR

SEQ ID NO: 1406 - protein, 229 aa, Mus musculus
MSSETGPVAVDPTLRRRIEPHEFEVFFDPRELRKETCLLYEINWGGRHSVWRHTSQNTSNHVEVNFLEKFTTERYFRPNTRCSITWFLSWSPCGECSRAITEFLSRHPYVTLFIYIARLYHHTDQRNRQGLRDLISSGVTIQIMTEQEYCYCWRNFVNYPPSNEAYWPRYPHLWVKLYVLELYCIILGLPPCLKILRRKQPQLTFFTITLQTCHYQRIPPHLLWATGLK

SEQ ID NO: 1407 - protein, 224 aa, Homo sapiens
MAQKEEAAVATEAASQNGEDLENLDDPEKLKELIELPPFEIVTGERLPANFFKFQFRNVEYSSGRNKTFLCYVVEAQGKGGQVQASRGYLEDEHAAAHAEEAFFNTILPAFDPALRYNVTWYVSSSPCAACADRIIKTLSKTKNLRLLILVGRLFMWEEPEIQAALKKLKEAGCKLRIMKPQDFEYVWQNFVEQEEGESKAFQPWEDIQENFLYYEEKLADILK

SEQ ID NO: 1408 - protein, 224 aa, Mus musculus
MAQKEEAAEAAAPASQNGDDLENLEDPEKLKELIDLPPFEIVTGVRLPVNFFKFQFRNVEYSSGRNKTFLCYVVEVQSKGGQAQATQGYLEDEHAGAHAEEAFFNTILPAFDPALKYNVTWYVSSSPCAACADRILKTLSKTKNLRLLILVSRLFMWEEPEVQAALKKLKEAGCKLRIMKPQDFEYIWQNFVEQEEGESKAFEPWEDIQENFLYYEEKLADILK

SEQ ID NO: 1409 - protein, 224 aa, Rattus norvegicus
MAQKEEAAEAAAPASQNGDDLENLEDPEKLKELIDLPPFEIVTGVRLPVNFFKFQFRNVEYSSGRNKTFLCYVVEAQSKGGQVQATQGYLEDEHAGAHAEEAFFNTILPAFDPALKYNVTWYVSSSPCAACADRILKTLSKTKNLRLLILVSRLFMWEEPEVQAALKKLKEAGCKLRIMKPQDFEYLWQNFVEQEEGESKAFEPWEDIQENFLYYEEKLADILK

SEQ ID NO: 1410 - protein, 208 aa, Petromyzon marinus
MTDAEYVRIHEKLDIYTFKKQFFNNKKSVSHRCYVLFELKRRGERRACFWGYAVNKPQSGTERGIHAEIFSIRKVEEYLRDNPGQFTINWYSSWSPCADCAEKILEWYNQELRGNGHTLKIWACKLYYEKNARNQIGLWNLRDNGVGLNVMVSEHYQCCRKIFIQSSHNQLNENRWLEKTLKRAEKRRSELSFMIQVKILHTTKSPAV

SEQ ID NO: 1411 - protein, 381 aa, synthetic construct
  REGION 1..381: note = Description of Artificial Sequence: Synthetic polypeptide
MKPHFRNTVERMYRDTFSYNFYNRPILSRRNTVWLCYEVKTKGPSRPPLDAKIFRGQVYSELKYHPEMRFFHWFSKWRKLHRDQEYEVTWYISWSPCTKCTRDMATFLAEDPKVTLTIFVARLYYFWDPDYQEALRSLCQKRDGPRATMKFNYDEFQHCWSKFVYSQRELFEPWNNLPKYYILLHFMLGEILRHSMDPPTFTFNFNNEPWVRGRHETYLCYEVERMHNDTWVLLNQRRGFLCNQAPHKHGFLEGRHAELCFLDVIPFWKLDLDQDYRVTCFTSWSPCFSCAQEMAKFISKKHVSLCIFTARIYRRQGRCQEGLRTLAEAGAKISFTYSEFKHCWDTFVDHQGCPFQPWDGLDEHSQDLSGRLRAILQNQEN

SEQ ID NO: 1412 - protein, 182 aa, Homo sapiens
MDPPTFTFNFNNEPWWGRHETYLCYEVERMHNDTWVLLNQRRGFLCNQAPHKHGFLEGRHAELCFLDVIPFWKLDLDQDYRVTCFTSWSPCFSCAQEMAKFISKNKHVSLCIFTARIYDDQGRCQEGLRTLAEAGAKISFTYSEFKHCWDTFVDHQGCPFQPWDGLDEHSQDLSGRLRAILQ

SEQ ID NO: 1413 - skipped

SEQ ID NO: 1414 - protein, 184 aa, synthetic construct
  REGION 1..184: note = Description of Artificial Sequence: Synthetic polypeptide
MDPPTFTFNFNNEPWVRGRHETYLCYEVERMHNDTWVLLNQRRGFLCNQAPHKHGFLEGRHAELCFLDVIPFWKLDLDQDYRVTCFTSWSPCFSCAQEMAKFISKNKHVSLCIFTARIYRRQGRCQEGLRTLAEAGAKISFMTYSEFKHCWDTFVDHQGCPFQPWDGLDEHSQDLSGRLRAILQ

SEQ ID NO: 1415 - protein, 367 aa, Homo sapiens
MEPIYEEYLANHGTIVKPYYWLSFSLDCSNCPYHIRTGEEARVSLTEFCQIFGFPYGTTFPQTKHLTFYELKTSSGSLVQKGHASSCTGNYIHPESMLFEMNGYLDSAIYNNDSIRHIILYSNNSPCNEANHCCISKMYNFLITYPGITLSIYFSQLYHTEMDFPASAWNREALRSLASLWPRVVLSPISGGIWHSVLHSFISGVSGSHVFQPILTGRALADRHNAYEINAITGVKPYFTDVLLQTKRNPNTKAQEALESYPLNNAFPGQFFQMPSGQLQPNLPPDLRAPVVFVLVPLRDLPPMHMGQNPNKPRNIVRHLNMPQMSFQETKDLGRLPTGRSVEIVEITEQFASSKEADEKKKKKGKK

SEQ ID NO: 1416 - protein, 388 aa, Rattus norvegicus
MEPLYEEYLTHSGTIVKPYYWLSVSLNCTNCPYHIRTGEEARVPYTEFHQTFGFPWSTYPQTKHLTFYELRSSSGNLIQKGLASNCTGSHTHPESMLFERDGYLDSLIFHDSNIRHIILYSNNSPCDEANHCCISKMYNFLMNYPEVTLSVFFSQLYHTENQFPTSAWNREALRGLASLWPQVTLSAISGGIWQSILETFVSGISEGLTAVRPFTAGRTLTDRYNAYEINCITEVKPYFTDALHSWQKENQDQKVWAASENQPLHNTTPAQWQPDMSQDCRTPAVFMLVPYRDLPPIHVNPSPQKPRTVVRHLNTLQLSASKVKALRKSPSGRPVKKEEARKGSTRSQEANETNKSKWKKQTLFIKSNICHLLEREQKKIGILSSWSV

SEQ ID NO: 1417 - protein, 224 aa, Petromyzon marinus
MAGYECVRVSEKLDFDTFEFQFENLHYATERHRTYVIFDVKPQSAGGRSRRLWGYIINNPNVCHAELILMSMIDRHLESNPGVYAMTWYMSWSPCANCSSKLNPWLKNLLEEQGHTLTMHFSRIYDRDREGDHRGLRGLKHVSNSFRMGVVGRAEVKECLAEYVEASRRTLTWLDTTESMAAKMRRKLFCILVRCAGMRESGIPLHLFTLQTPLLSGRVVWWRV

SEQ ID NO: 1418 - protein, 331 aa, Petromyzon marinus
MELREVVDCALASCVRHEPLSRVAFLRCFAAPSQKPRGTVILFYVEGAGRGVTGGHAVNYNKQGTSIHAEVLLLSAVRAALLRRRRCEDGEEATRGCTLHCYSTYSPCRDCVEYIQEFGASTGVRVVIHCCRLYELDVNRRRSEAEGVLRSLSRLGRDFRLMGPRDAIALLLGGRLANTADGESGASGNAWVTETNVVEPLVDMTGFGDEDLHAQVQRNKQIREAYANYASAVSLMLGELHVDPDKFPFLAEFLAQTSVEPSGTPRETRGRPRGASSRGPEIGRQRPADFERALGAYGLFLHPRIVSREADREEIKRDLIVVMRKHNYQGP

SEQ ID NO: 1419 - protein, 209 aa, Petromyzon marinus
MAGDENVRVSEKLDFDTFEFQFENLHYATERHRTYVIFDVKPQSAGGRSRRLWGYIINNPNVCHAELILMSMIDRHLESNPGVYAMTWYMSWSPCANCSSKLNPWLKNLLEEQGHTLMMHFSRIYDRDREGDHRGLRGLKHVSNSFRMGVVGRAEVKECLAEYVEASRRTLTWLDTTESMAAKMRRKLFCILVRCAGMRESGMPLHLFT

SEQ ID NO: 1420 - protein, 158 aa, unidentified
  REGION 1..158: note = Description of Unknown: yCD polypeptide sequence
MVTGGMASKWDQKGMDIAYEEAALGYKEGGVPIGGCLINNKDGSVLGRGHNMRFQKGSATLHGEISTLENCGRLEGKVYKDTTLYTTLSPCDMCTGAIIMYGIPRCVVGENVNFKSKGEKYLQTRGHEVVVVDDERCKKIMKQFIDERPQDWFEDIGE

SEQ ID NO: 1421 - protein, 218 aa, Rattus norvegicus
MSSETGPVAVDPTLRRRIEPHEFEVFFDPRELRKETCLLYEINWGGRHSIWRHTSQNTNKHVEVNFIEKFTTERYFCPNTRCSITWFLSWSPCGECSRAITEFLSRYPHVTLFIYIARLYHHADPRNRQGLRDLISSGVTIQIMTEQESGYCWRNFVNYSPSNEAHWPRYPHLWVRGLPPCLNILRRKQPQLTFFTIALQSCHYQRLPPHILWATGLK

SEQ ID NO: 1422 - protein, 218 aa, Rattus norvegicus
MSSETGPVAVDPTLRRRIEPHEFEVFFDPRELRKETCLLYEINWGGRHSIWRHTSQNTNKHVEVNFIEKFTTERYFCPNTRCSITWFLSWSPCGECSRAITEFLSRYPHVTLFIYIARLYHHADPRNRQGLRDLISSGVTIQIMTEQESGYCWRNFVNYSPSNEAHWPRYPHLWVRLYVLELYCIILGLPPCLNILRRKQPQHYQRLPPHILWATGLK

SEQ ID NO: 1423 - protein, 1368 aa, synthetic construct
  REGION 1..1368: note = Description of Artificial Sequence: Synthetic polypeptide
MDKKYSIGLAIGTNSVGWAVITDEYKVPSKKFKVLGNTDRHSIKKNLIGALLFDSGETAEATRLKRTARRRYTRRKNRICYLQEIFSNEMAKVDDSFFHRLEESFLVEEDKKHERHPIFGNIVDEVAYHEKYPTIYHLRKKLVDSTDKADLRLIYLALAHMIKFRGHFLIEGDLNPDNSDVDKLFIQLVQTYNQLFEENPINASGVDAKAILSARLSKSRRLENLIAQLPGEKKNGLFGNLIALSLGLTPNFKSNFDLAEDAKLQLSKDTYDDDLDNLLAQIGDQYADLFLAAKNLSDAILLSDILRVNTEITKAPLSASMIKRYDEHHQDLTLLKALVRQQLPEKYKEIFFDQSKNGYAGYIDGGASQEEFYKFIKPILEKMDGTEELLVKLNREDLLRKQRTFDNGSIPHQIHLGELHAILRRQEDFYPFLKDNREKIEKILTFRIPYYVGPLARGNSRFAWMTRKSEETITPWNFEEVVDKGASAQSFIERMTAFDKNLPNEKVLPKHSLLYEYFTVYNELTKVKYVTEGMRKPAFLSGEQKKAIVDLLFKTNRKVTVKQLKEDYFKKIECFDSVEISGVEDRFNASLGTYHDLLKIIKDKDFLDNEENEDILEDIVLTLTLFEDREMIEERLKTYAHLFDDKVMKQLKRRRYTGWGALSRKLINGIRDKQSGKTILDFLKSDGFANRNFMALIHDDSLTFKEDIQKAQVSGQGDSLHEHIANLAGSPAIKKGILQTVKVVDELVKVMGRHKPENIVIEMARENQTTQKGQKNSRERMKRIEEGIKELGSQILKEHPVENTQLQNEKLYLYYLQNGRDMYVDQELDINRLSDYDVDHIVPQSFLKDDSIDNKVLTRSDKNRGKSDNVPSEEVVKKMKNYWRQLLNAKLITQRKFDNLTKAERGGLSELDKAGFIKRQLVETRAITKHVAQILDSRMNTKYDENDKLIREVKVITLKSKLVSDFRKDFQFYKVREINNYHHAHDAYLNAVVGTALIKKYPKLESEFVYGDYKVYDVRKMIAKSEQEIGKATAKYFFYSNIMNFFKTEITLANGEIRKRPLIETNGETGEIVWDKGRDFATVRKVLSMPQVNIVKKTEVQTGGFSKESILPKRNSDKLIARKKDWDPKKYGGFDSPTVAYSVLVVAKVEKGKSKKLKSVKELLGITIMERSSFEKNPIDFLEAKGYKEVKKDLIIKLPKYSLFELENGRKRMLASAGELQKGNELALPSKYVNFLYLASHYEKLKGSPEDNEQKQLFVEQHKHYLDEIIEQISEFSKRVILADANLDKVLSAYNKHRDKPIREQAENIIHLFTLTNLGAPAAFKYFDTTIDRKRYTSTKEVLDATLIHQSITGLYETRIDLSQLGGD

SEQ ID NO: 1424 - protein, 23 aa, synthetic construct
  REGION 1..23: note = Description of Artificial Sequence: Synthetic peptide
RKSGKIAAIVVKRPRKPKKKRKV

SEQ ID NO: 1425 - protein, 8 aa, synthetic construct
  REGION 1..8: note = Description of Artificial Sequence: Synthetic peptide
SGGSSGGS

SEQ ID NO: 1426 - protein, 1609 aa, synthetic construct
  REGION 1..1609: note = Description of Artificial Sequence: Synthetic polypeptide
MSEVEFSHEYWMRHALTLAKRARDEREVPVGAVLVLNNRVIGEGWNRAIGLHDPTAHAEIMALRQGGLVMQNYRLIDATLYVTFEPCVMCAGAMIHSRIGRVVFGVRNAKTGAAGSLMDVLHYPGMNHRVEITEGILADECAALLCTFFRMPRQVFNAQKKAQSSTDSGGSSGGSSGSETPGTSESATPESSGGSSGGSEIGKATAKYFFYSNIMNFFKTEITLANGEIRKRPLIETNGETGEIVWDKGRDFATVRKVLSMPQVNIVKKTEVQTGGFSKESILPKRNSDKLIARKKDWDPKKYGGFMQPTVAYSVLVVAKVEKGKSKKLKSVKELLGITIMERSSFEKNPIDFLEAKGYKEVKKDLIIKLPKYSLFELENGRKRMLASAKFLQKGNELALPSKYVNFLYLASHYEKLKGSPEDNEQKQLFVEQHKHYLDEIIEQISEFSKRVILADANLDKVLSAYNKHRDKPIREQAENIIHLFTLTNLGAPRAFKYFDTTIARKEYRSTKEVLDATLIHQSITGLYETRIDLSQLGGDGGSGGSGGSGGSGGSGGSGGMDKKYSIGLAIGTNSVGWAVITDEYKVPSKKFKVLGNTDRHSIKKNLIGALLFDSGETAEATRLKRTARRRYTRRKNRICYLQEIFSNEMAKVDDSFFHRLEESFLVEEDKKHERHPIFGNIVDEVAYHEKYPTIYHLRKKLVDSTDKADLRLIYLALAHMIKFRGHFLIEGDLNPDNSDVDKLFIQLVQTYNQLFEENPINASGVDAKAILSARLSKSRRLENLIAQLPGEKKNGLFGNLIALSLGLTPNFKSNFDLAEDAKLQLSKDTYDDDLDNLLAQIGDQYADLFLAAKNLSDAILLSDILRVNTEITKAPLSASMIKRYDEHHQDLTLLKALVRQQLPEKYKEIFFDQSKNGYAGYIDGGASQEEFYKFIKPILEKMDGTEELLVKLNREDLLRKQRTFDNGSIPHQIHLGELHAILRRQEDFYPFLKDNREKIEKILTFRIPYYVGPLARGNSRFAWMTRKSEETITPWNFEEVVDKGASAQSFIERMTNFDKNLPNEKVLPKHSLLYEYFTVYNELTKVKYVTEGMRKPAFLSGEQKKAIVDLLFKTNRKVTVKQLKEDYFKKIECFDSVEISGVEDRFNASLGTYHDLLKIIKDKDFLDNEENEDILEDIVLTLTLFEDREMIEERLKTYAHLFDDKVMKQLKRRRYTGWGRLSRKLINGIRDKQSGKTILDFLKSDGFANRNFMQLIHDDSLTFKEDIQKAQVSGQGDSLHEHIANLAGSPAIKKGILQTVKVVDELVKVMGRHKPENIVIEMARENQTTQKGQKNSRERMKRIEEGIKELGSQILKEHPVENTQLQNEKLYLYYLQNGRDMYVDQELDINRLSDYDVDHIVPQSFLKDDSIDNKVLTRSDKNRGKSDNVPSEEVVKKMKNYWRQLLNAKLITQRKFDNLTKAERGGLSELDKAGFIKRQLVETRQITKHVAQILDSRMNTKYDENDKLIREVKVITLKSKLVSDFRKDFQFYKVREINNYHHAHDAYLNAVVGTALIKKYPKLESEFVYGDYKVYDVRKMIAKSEQEGADKRTADGSEFESPKKKRKV

SEQ ID NO: 1427 - protein, 1807 aa, synthetic construct
  REGION 1..1807: note = Description of Artificial Sequence: Synthetic polypeptide
MSEVEFSHEYWMRHALTLAKRAWDEREVPVGAVLVHNNRVIGEGWNRPIGRHDPTAHAEIMALRQGGLVMQNYRLIDATLYVTLEPCVMCAGAMIHSRIGRVVFGARDAKTGAAGSLMDVLHHPGMNHRVEITEGILADECAALLSDFFRMRRQEIKAQKKAQSSTDGGSSGGSSGSETPGTSESATPESSGGSSGGSMSEVEFSHEYWMRHALTLAKRARDEREVPVGAVLVLNNRVIGEGWNRAIGLHDPTAHAEIMALRQGGLVMQNYRLIDATLYVTFEPCVMCAGAMIHSRIGRVVFGVRNAKTGAAGSLMDVLHYPGMNHRVEITEGILADECAALLCTFFRMPRQVFNAQKKAQSSTDSGGSSGGSSGSETPGTSESATPESSGGSSGGSEIGKATAKYFFYSNIMNFFKTEITLANGEIRKRPLIETNGETGEIVWDKGRDFATVRKVLSMPQVNIVKKTEVQTGGFSKESILPKRNSDKLIARKKDWDPKKYGGFMQPTVAYSVLVVAKVEKGKSKKLKSVKELLGITIMERSSFEKNPIDFLEAKGYKEVKKDLIIKLPKYSLFELENGRKRMLASAKFLQKGNELALPSKYVNFLYLASHYEKLKGSPEDNEQKQLFVEQHKHYLDEIIEQISEFSKRVILADANLDKVLSAYNKHRDKPIREQAENIIHLFTLTNLGAPRAFKYFDTTIARKEYRSTKEVLDATLIHQSITGLYETRIDLSQLGGDGGSGGSGGSGGSGGSGGSGGMDKKYSIGLAIGTNSVGWAVITDEYKVPSKKFKVLGNTDRHSIKKNLIGALLFDSGETAEATRLKRTARRRYTRRKNRICYLQEIFSNEMAKVDDSFFHRLEESFLVEEDKKHERHPIFGNIVDEVAYHEKYPTIYHLRKKLVDSTDKADLRLIYLALAHMIKFRGHFLIEGDLNPDNSDVDKLFIQLVQTYNQLFEENPINASGVDAKAILSARLSKSRRLENLIAQLPGEKKNGLFGNLIALSLGLTPNFKSNFDLAEDAKLQLSKDTYDDDLDNLLAQIGDQYADLFLAAKNLSDAILLSDILRVNTEITKAPLSASMIKRYDEHHQDLTLLKALVRQQLPEKYKEIFFDQSKNGYAGYIDGGASQEEFYKFIKPILEKMDGTEELLVKLNREDLLRKQRTFDNGSIPHQIHLGELHAILRRQEDFYPFLKDNREKIEKILTFRIPYYVGPLARGNSRFAWMTRKSEETITPWNFEEVVDKGASAQSFIERMTNFDKNLPNEKVLPKHSLLYEYFTVYNELTKVKYVTEGMRKPAFLSGEQKKAIVDLLFKTNRKVTVKQLKEDYFKKIECFDSVEISGVEDRFNASLGTYHDLLKIIKDKDFLDNEENEDILEDIVLTLTLFEDREMIEERLKTYAHLFDDKVMKQLKRRRYTGWGRLSRKLINGIRDKQSGKTILDFLKSDGFANRNFMQLIHDDSLTFKEDIQKAQVSGQGDSLHEHIANLAGSPAIKKGILQTVKVVDELVKVMGRHKPENIVIEMARENQTTQKGQKNSRERMKRIEEGIKELGSQILKEHPVENTQLQNEKLYLYYLQNGRDMYVDQELDINRLSDYDVDHIVPQSFLKDDSIDNKVLTRSDKNRGKSDNVPSEEVVKKMKNYWRQLLNAKLITQRKFDNLTKAERGGLSELDKAGFIKRQLVETRQITKHVAQILDSRMNTKYDENDKLIREVKVITLKSKLVSDFRKDFQFYKVREINNYHHAHDAYLNAVVGTALIKKYPKLESEFVYGDYKVYDVRKMIAKSEQEGADKRTADGSEFESPKKKRKV

SEQ ID NO: 1428 - protein, 1588 aa, synthetic construct
  REGION 1..1588: note = Description of Artificial Sequence: Synthetic polypeptide
MSEVEFSHEYWMRHALTLAKRARDEREVPVGAVLVLNNRVIGEGWNRAIGLHDPTAHAEIMALRQGGLVMQNYRLIDATLYVTFEPCVMCAGAMIHSRIGRVVFGVRNAKTGAAGSLMDVLHHPGMNHRVEITEGILADECAALLCRFFRMPRRVFNAQKKAQSSTDSGGSSGGSSGSETPGTSESATPESSGGSSGGSDKKYSIGLAIGTNSVGWAVITDEYKVPSKKFKVLGNTDRHSIKKNLIGALLFDSGETAEATRLKRTARRRYTRRKNRICYLQEIFSNEMAKVDDSFFHRLEESFLVEEDKKHERHPIFGNIVDEVAYHEKYPTIYHLRKKLVDSTDKADLRLIYLALAHMIKFRGHFLIEGDLNPDNSDVDKLFIQLVQTYNQLFEENPINASGVDAKAILSARLSKSRRLENLIAQLPGEKKNGLFGNLIALSLGLTPNFKSNFDLAEDAKLQLSKDTYDDDLDNLLAQIGDQYADLFLAAKNLSDAILLSDILRVNTEITKAPLSASMIKRYDEHHQDLTLLKALVRQQLPEKYKEIFFDQSKNGYAGYIDGGASQEEFYKFIKPILEKMDGTEELLVKLNREDLLRKQRTFDNGSIPHQIHLGELHAILRRQEDFYPFLKDNREKIEKILTFRIPYYVGPLARGNSRFAWMTRKSEETITPWNFEEVVDKGASAQSFIERMTNFDKNLPNEKVLPKHSLLYEYFTVYNELTKVKYVTEGMRKPAFLSGEQKKAIVDLLFKTNRKVTVKQLKEDYFKKIECFDSVEISGVEDRFNASLGTYHDLLKIIKDKDFLDNEENEDILEDIVLTLTLFEDREMIEERLKTYAHLFDDKVMKQLKRRRYTGWGRLSRKLINGIRDKQSGKTILDFLKSDGFANRNFMQLIHDDSLTFKEDIQKAQVSGQGDSLHEHIANLAGSPAIKKGILQTVKVVDELVKVMGRHKPENIVIEMARENQTTQKGQKNSRERMKRIEEGIKELGSQILKEHPVENTQLQNEKLYLYYLQNGRDMYVDQELDINRLSDYDVDHIVPQSFLKDDSIDNKVLTRSDKNRGKSDNVPSEEVVKKMKNYWRQLLNAKLITQRKFDNLTKAERGGLSELDKAGFIKRQLVETRQITKHVAQILDSRMNTKYDENDKLIREVKVITLKSKLVSDFRKDFQFYKVREINNYHHAHDAYLNAVVGTALIKKYPKLESEFVYGDYKVYDVRKMIAKSEQEIGKATAKYFFYSNIMNFFKTEITLANGEIRKRPLIETNGETGEIVWDKGRDFATVRKVLSMPQVNIVKKTEVQTGGFSKESILPKRNSDKLIARKKDWDPKKYGGFDSPTVAYSVLVVAKVEKGKSKKLKSVKELLGITIMERSSFEKNPIDFLEAKGYKEVKKDLIIKLPKYSLFELENGRKRMLASAGELQKGNELALPSKYVNFLYLASHYEKLKGSPEDNEQKQLFVEQHKHYLDEIIEQISEFSKRVILADANLDKVLSAYNKHRDKPIREQAENIIHLFTLTNLGAPAAFKYFDTTIDRKRYTSTKEVLDATLIHQSITGLYETRIDLSQLGGDEGADKRTADGSEFESPKKKRKV

SEQ ID NO: 1429 - protein, 1786 aa, synthetic construct
  REGION 1..1786: note = Description of Artificial Sequence: Synthetic polypeptide
MSEVEFSHEYWMRHALTLAKRAWDEREVPVGAVLVHNNRVIGEGWNRPIGRHDPTAHAEIMALRQGGLVMQNYRLIDATLYVTLEPCVMCAGAMIHSRIGRVVFGARDAKTGAAGSLMDVLHHPGMNHRVEITEGILADECAALLSDFFRMRRQEIKAQKKAQSSTDSGGSSGGSSGSETPGTSESATPESSGGSSGGSSEVEFSHEYWMRHALTLAKRARDEREVPVGAVLVLNNRVIGEGWNRAIGLHDPTAHAEIMALRQGGLVMQNYRLIDATLYVTFEPCVMCAGAMIHSRIGRVVFGVRNAKTGAAGSLMDVLHHPGMNHRVEITEGILADECAALLCRFFRMPRRVFNAQKKAQSSTDSGGSSGGSSGSETPGTSESATPESSGGSSGGSDKKYSIGLAIGTNSVGWAVITDEYKVPSKKFKVLGNTDRHSIKKNLIGALLFDSGETAEATRLKRTARRRYTRRKNRICYLQEIFSNEMAKVDDSFFHRLEESFLVEEDKKHERHPIFGNIVDEVAYHEKYPTIYHLRKKLVDSTDKADLRLIYLALAHMIKFRGHFLIEGDLNPDNSDVDKLFIQLVQTYNQLFEENPINASGVDAKAILSARLSKSRRLENLIAQLPGEKKNGLFGNLIALSLGLTPNFKSNFDLAEDAKLQLSKDTYDDDLDNLLAQIGDQYADLFLAAKNLSDAILLSDILRVNTEITKAPLSASMIKRYDEHHQDLTLLKALVRQQLPEKYKEIFFDQSKNGYAGYIDGGASQEEFYKFIKPILEKMDGTEELLVKLNREDLLRKQRTFDNGSIPHQIHLGELHAILRRQEDFYPFLKDNREKIEKILTFRIPYYVGPLARGNSRFAWMTRKSEETITPWNFEEVVDKGASAQSFIERMTNFDKNLPNEKVLPKHSLLYEYFTVYNELTKVKYVTEGMRKPAFLSGEQKKAIVDLLFKTNRKVTVKQLKEDYFKKIECFDSVEISGVEDRFNASLGTYHDLLKIIKDKDFLDNEENEDILEDIVLTLTLFEDREMIEERLKTYAHLFDDKVMKQLKRRRYTGWGRLSRKLINGIRDKQSGKTILDFLKSDGFANRNFMQLIHDDSLTFKEDIQKAQVSGQGDSLHEHIANLAGSPAIKKGILQTVKVVDELVKVMGRHKPENIVIEMARENQTTQKGQKNSRERMKRIEEGIKELGSQILKEHPVENTQLQNEKLYLYYLQNGRDMYVDQELDINRLSDYDVDHIVPQSFLKDDSIDNKVLTRSDKNRGKSDNVPSEEVVKKMKNYWRQLLNAKLITQRKFDNLTKAERGGLSELDKAGFIKRQLVETRQITKHVAQILDSRMNTKYDENDKLIREVKVITLKSKLVSDFRKDFQFYKVREINNYHHAHDAYLNAVVGTALIKKYPKLESEFVYGDYKVYDVRKMIAKSEQEIGKATAKYFFYSNIMNFFKTEITLANGEIRKRPLIETNGETGEIVWDKGRDFATVRKVLSMPQVNIVKKTEVQTGGFSKESILPKRNSDKLIARKKDWDPKKYGGFDSPTVAYSVLVVAKVEKGKSKKLKSVKELLGITIMERSSFEKNPIDFLEAKGYKEVKKDLIIKLPKYSLFELENGRKRMLASAGELQKGNELALPSKYVNFLYLASHYEKLKGSPEDNEQKQLFVEQHKHYLDEIIEQISEFSKRVILADANLDKVLSAYNKHRDKPIREQAENIIHLFTLTNLGAPAAFKYFDTTIDRKRYTSTKEVLDATLIHQSITGLYETRIDLSQLGGDEGADKRTADGSEFESPKKKRKV

SEQ ID NO: 1430 - protein, 1588 aa, synthetic construct
  REGION 1..1588: note = Description of Artificial Sequence: Synthetic polypeptide
MSEVEFSHEYWMRHALTLAKRARDEREVPVGAVLVLNNRVIGEGWNRAIGLHDPTAHAEIMALRQGGLVMQNYRLYDATLYVTFEPCVMCAGAMIHSRIGRVVFGVRNAKTGAAGSLMDVLHHPGMNHRVEITEGILADECAALLCRFFRMPRRVFNAQKKAQSSTDSGGSSGGSSGSETPGTSESATPESSGGSSGGSDKKYSIGLAIGTNSVGWAVITDEYKVPSKKFKVLGNTDRHSIKKNLIGALLFDSGETAEATRLKRTARRRYTRRKNRICYLQEIFSNEMAKVDDSFFHRLEESFLVEEDKKHERHPIFGNIVDEVAYHEKYPTIYHLRKKLVDSTDKADLRLIYLALAHMIKFRGHFLIEGDLNPDNSDVDKLFIQLVQTYNQLFEENPINASGVDAKAILSARLSKSRRLENLIAQLPGEKKNGLFGNLIALSLGLTPNFKSNFDLAEDAKLQLSKDTYDDDLDNLLAQIGDQYADLFLAAKNLSDAILLSDILRVNTEITKAPLSASMIKRYDEHHQDLTLLKALVRQQLPEKYKEIFFDQSKNGYAGYIDGGASQEEFYKFIKPILEKMDGTEELLVKLNREDLLRKQRTFDNGSIPHQIHLGELHAILRRQEDFYPFLKDNREKIEKILTFRIPYYVGPLARGNSRFAWMTRKSEETITPWNFEEVVDKGASAQSFIERMTNFDKNLPNEKVLPKHSLLYEYFTVYNELTKVKYVTEGMRKPAFLSGEQKKAIVDLLFKTNRKVTVKQLKEDYFKKIECFDSVEISGVEDRFNASLGTYHDLLKIIKDKDFLDNEENEDILEDIVLTLTLFEDREMIEERLKTYAHLFDDKVMKQLKRRRYTGWGRLSRKLINGIRDKQSGKTILDFLKSDGFANRNFMQLIHDDSLTFKEDIQKAQVSGQGDSLHEHIANLAGSPAIKKGILQTVKVVDELVKVMGRHKPENIVIEMARENQTTQKGQKNSRERMKRIEEGIKELGSQILKEHPVENTQLQNEKLYLYYLQNGRDMYVDQELDINRLSDYDVDHIVPQSFLKDDSIDNKVLTRSDKNRGKSDNVPSEEVVKKMKNYWRQLLNAKLITQRKFDNLTKAERGGLSELDKAGFIKRQLVETRQITKHVAQILDSRMNTKYDENDKLIREVKVITLKSKLVSDFRKDFQFYKVREINNYHHAHDAYLNAVVGTALIKKYPKLESEFVYGDYKVYDVRKMIAKSEQEIGKATAKYFFYSNIMNFFKTEITLANGEIRKRPLIETNGETGEIVWDKGRDFATVRKVLSMPQVNIVKKTEVQTGGFSKESILPKRNSDKLIARKKDWDPKKYGGFDSPTVAYSVLVVAKVEKGKSKKLKSVKELLGITIMERSSFEKNPIDFLEAKGYKEVKKDLIIKLPKYSLFELENGRKRMLASAGELQKGNELALPSKYVNFLYLASHYEKLKGSPEDNEQKQLFVEQHKHYLDEIIEQISEFSKRVILADANLDKVLSAYNKHRDKPIREQAENIIHLFTLTNLGAPAAFKYFDTTIDRKRYTSTKEVLDATLIHQSITGLYETRIDLSQLGGDEGADKRTADGSEFESPKKKRKV

SEQ ID NO: 1431 - protein, 1786 aa, synthetic construct
  REGION 1..1786: note = Description of Artificial Sequence: Synthetic polypeptide
MSEVEFSHEYWMRHALTLAKRAWDEREVPVGAVLVHNNRVIGEGWNRPIGRHDPTAHAEIMALRQGGLVMQNYRLIDATLYVTLEPCVMCAGAMIHSRIGRVVFGARDAKTGAAGSLMDVLHHPGMNHRVEITEGILADECAALLSDFFRMRRQEIKAQKKAQSSTDSGGSSGGSSGSETPGTSESATPESSGGSSGGSSEVEFSHEYWMRHALTLAKRARDEREVPVGAVLVLNNRVIGEGWNRAIGLHDPTAHAEIMALRQGGLVMQNYRLYDATLYVTFEPCVMCAGAMIHSRIGRVVFGVRNAKTGAAGSLMDVLHHPGMNHRVEITEGILADECAALLCRFFRMPRRVFNAQKKAQSSTDSGGSSGGSSGSETPGTSESATPESSGGSSGGSDKKYSIGLAIGTNSVGWAVITDEYKVPSKKFKVLGNTDRHSIKKNLIGALLFDSGETAEATRLKRTARRRYTRRKNRICYLQEIFSNEMAKVDDSFFHRLEESFLVEEDKKHERHPIFGNIVDEVAYHEKYPTIYHLRKKLVDSTDKADLRLIYLALAHMIKFRGHFLIEGDLNPDNSDVDKLFIQLVQTYNQLFEENPINASGVDAKAILSARLSKSRRLENLIAQLPGEKKNGLFGNLIALSLGLTPNFKSNFDLAEDAKLQLSKDTYDDDLDNLLAQIGDQYADLFLAAKNLSDAILLSDILRVNTEITKAPLSASMIKRYDEHHQDLTLLKALVRQQLPEKYKEIFFDQSKNGYAGYIDGGASQEEFYKFIKPILEKMDGTEELLVKLNREDLLRKQRTFDNGSIPHQIHLGELHAILRRQEDFYPFLKDNREKIEKILTFRIPYYVGPLARGNSRFAWMTRKSEETITPWNFEEVVDKGASAQSFIERMTNFDKNLPNEKVLPKHSLLYEYFTVYNELTKVKYVTEGMRKPAFLSGEQKKAIVDLLFKTNRKVTVKQLKEDYFKKIECFDSVEISGVEDRFNASLGTYHDLLKIIKDKDFLDNEENEDILEDIVLTLTLFEDREMIEERLKTYAHLFDDKVMKQLKRRRYTGWGRLSRKLINGIRDKQSGKTILDFLKSDGFANRNFMQLIHDDSLTFKEDIQKAQVSGQGDSLHEHIANLAGSPAIKKGILQTVKVVDELVKVMGRHKPENIVIEMARENQTTQKGQKNSRERMKRIEEGIKELGSQILKEHPVENTQLQNEKLYLYYLQNGRDMYVDQELDINRLSDYDVDHIVPQSFLKDDSIDNKVLTRSDKNRGKSDNVPSEEVVKKMKNYWRQLLNAKLITQRKFDNLTKAERGGLSELDKAGFIKRQLVETRQITKHVAQILDSRMNTKYDENDKLIREVKVITLKSKLVSDFRKDFQFYKVREINNYHHAHDAYLNAVVGTALIKKYPKLESEFVYGDYKVYDVRKMIAKSEQEIGKATAKYFFYSNIMNFFKTEITLANGEIRKRPLIETNGETGEIVWDKGRDFATVRKVLSMPQVNIVKKTEVQTGGFSKESILPKRNSDKLIARKKDWDPKKYGGFDSPTVAYSVLVVAKVEKGKSKKLKSVKELLGITIMERSSFEKNPIDFLEAKGYKEVKKDLIIKLPKYSLFELENGRKRMLASAGELQKGNELALPSKYVNFLYLASHYEKLKGSPEDNEQKQLFVEQHKHYLDEIIEQISEFSKRVILADANLDKVLSAYNKHRDKPIREQAENIIHLFTLTNLGAPAAFKYFDTTIDRKRYTSTKEVLDATLIHQSITGLYETRIDLSQLGGDEGADKRTADGSEFESPKKKRKV

SEQ ID NO: 1432 - protein, 1588 aa, synthetic construct
  REGION 1..1588: note = Description of Artificial Sequence: Synthetic polypeptide
MSEVEFSHEYWMRHALTLAKRARDEREVPVGAVLVLNNRVIGEGWNRAIGLHDPTAHAEIMALRQGGLVMQNYRLIDATLYSTFEPCVMCAGAMIHSRIGRVVFGVRNAKTGAAGSLMDVLHYPGMNHRVEITEGILADECAALLCYFFRMPRRVFNAQKKAQSSTDSGGSSGGSSGSETPGTSESATPESSGGSSGGSDKKYSIGLAIGTNSVGWAVITDEYKVPSKKFKVLGNTDRHSIKKNLIGALLFDSGETAEATRLKRTARRRYTRRKNRICYLQEIFSNEMAKVDDSFFHRLEESFLVEEDKKHERHPIFGNIVDEVAYHEKYPTIYHLRKKLVDSTDKADLRLIYLALAHMIKFRGHFLIEGDLNPDNSDVDKLFIQLVQTYNQLFEENPINASGVDAKAILSARLSKSRRLENLIAQLPGEKKNGLFGNLIALSLGLTPNFKSNFDLAEDAKLQLSKDTYDDDLDNLLAQIGDQYADLFLAAKNLSDAILLSDILRVNTEITKAPLSASMIKRYDEHHQDLTLLKALVRQQLPEKYKEIFFDQSKNGYAGYIDGGASQEEFYKFIKPILEKMDGTEELLVKLNREDLLRKQRTFDNGSIPHQIHLGELHAILRRQEDFYPFLKDNREKIEKILTFRIPYYVGPLARGNSRFAWMTRKSEETITPWNFEEVVDKGASAQSFIERMTNFDKNLPNEKVLPKHSLLYEYFTVYNELTKVKYVTEGMRKPAFLSGEQKKAIVDLLFKTNRKVTVKQLKEDYFKKIECFDSVEISGVEDRFNASLGTYHDLLKIIKDKDFLDNEENEDILEDIVLTLTLFEDREMIEERLKTYAHLFDDKVMKQLKRRRYTGWGRLSRKLINGIRDKQSGKTILDFLKSDGFANRNFMQLIHDDSLTFKEDIQKAQVSGQGDSLHEHIANLAGSPAIKKGILQTVKVVDELVKVMGRHKPENIVIEMARENQTTQKGQKNSRERMKRIEEGIKELGSQILKEHPVENTQLQNEKLYLYYLQNGRDMYVDQELDINRLSDYDVDHIVPQSFLKDDSIDNKVLTRSDKNRGKSDNVPSEEVVKKMKNYWRQLLNAKLITQRKFDNLTKAERGGLSELDKAGFIKRQLVETRQITKHVAQILDSRMNTKYDENDKLIREVKVITLKSKLVSDFRKDFQFYKVREINNYHHAHDAYLNAVVGTALIKKYPKLESEFVYGDYKVYDVRKMIAKSEQEIGKATAKYFFYSNIMNFFKTEITLANGEIRKRPLIETNGETGEIVWDKGRDFATVRKVLSMPQVNIVKKTEVQTGGFSKESILPKRNSDKLIARKKDWDPKKYGGFDSPTVAYSVLVVAKVEKGKSKKLKSVKELLGITIMERSSFEKNPIDFLEAKGYKEVKKDLIIKLPKYSLFELENGRKRMLASAGELQKGNELALPSKYVNFLYLASHYEKLKGSPEDNEQKQLFVEQHKHYLDEIIEQISEFSKRVILADANLDKVLSAYNKHRDKPIREQAENIIHLFTLTNLGAPAAFKYFDTTIDRKRYTSTKEVLDATLIHQSITGLYETRIDLSQLGGDEGADKRTADGSEFESPKKKRKV

SEQ ID NO: 1433 - protein, 1786 aa, synthetic construct
  REGION 1..1786: note = Description of Artificial Sequence: Synthetic polypeptide
MSEVEFSHEYWMRHALTLAKRAWDEREVPVGAVLVHNNRVIGEGWNRPIGRHDPTAHAEIMALRQGGLVMQNYRLIDATLYVTLEPCVMCAGAMIHSRIGRVVFGARDAKTGAAGSLMDVLHHPGMNHRVEITEGILADECAALLSDFFRMRRQEIKAQKKAQSSTDSGGSSGGSSGSETPGTSESATPESSGGSSGGSSEVEFSHEYWMRHALTLAKRARDEREVPVGAVLVLNNRVIGEGWNRAIGLHDPTAHAEIMALRQGGLVMQNYRLIDATLYSTFEPCVMCAGAMIHSRIGRVVFGVRNAKTGAAGSLMDVLHYPGMNHRVEITEGILADECAALLCYFFRMPRRVFNAQKKAQSSTDSGGSSGGSSGSETPGTSESATPESSGGSSGGSDKKYSIGLAIGTNSVGWAVITDEYKVPSKKFKVLGNTDRHSIKKNLIGALLFDSGETAEATRLKRTARRRYTRRKNRICYLQEIFSNEMAKVDDSFFHRLEESFLVEEDKKHERHPIFGNIVDEVAYHEKYPTIYHLRKKLVDSTDKADLRLIYLALAHMIKFRGHFLIEGDLNPDNSDVDKLFIQLVQTYNQLFEENPINASGVDAKAILSARLSKSRRLENLIAQLPGEKKNGLFGNLIALSLGLTPNFKSNFDLAEDAKLQLSKDTYDDDLDNLLAQIGDQYADLFLAAKNLSDAILLSDILRVNTEITKAPLSASMIKRYDEHHQDLTLLKALVRQQLPEKYKEIFFDQSKNGYAGYIDGGASQEEFYKFIKPILEKMDGTEELLVKLNREDLLRKQRTFDNGSIPHQIHLGELHAILRRQEDFYPFLKDNREKIEKILTFRIPYYVGPLARGNSRFAWMTRKSEETITPWNFEEVVDKGASAQSFIERMTNFDKNLPNEKVLPKHSLLYEYFTVYNELTKVKYVTEGMRKPAFLSGEQKKAIVDLLFKTNRKVTVKQLKEDYFKKIECFDSVEISGVEDRFNASLGTYHDLLKIIKDKDFLDNEENEDILEDIVLTLTLFEDREMIEERLKTYAHLFDDKVMKQLKRRRYTGWGRLSRKLINGIRDKQSGKTILDFLKSDGFANRNFMQLIHDDSLTFKEDIQKAQVSGQGDSLHEHIANLAGSPAIKKGILQTVKVVDELVKVMGRHKPENIVIEMARENQTTQKGQKNSRERMKRIEEGIKELGSQILKEHPVENTQLQNEKLYLYYLQNGRDMYVDQELDINRLSDYDVDHIVPQSFLKDDSIDNKVLTRSDKNRGKSDNVPSEEVVKKMKNYWRQLLNAKLITQRKFDNLTKAERGGLSELDKAGFIKRQLVETRQITKHVAQILDSRMNTKYDENDKLIREVKVITLKSKLVSDFRKDFQFYKVREINNYHHAHDAYLNAVVGTALIKKYPKLESEFVYGDYKVYDVRKMIAKSEQEIGKATAKYFFYSNIMNFFKTEITLANGEIRKRPLIETNGETGEIVWDKGRDFATVRKVLSMPQVNIVKKTEVQTGGFSKESILPKRNSDKLIARKKDWDPKKYGGFDSPTVAYSVLVVAKVEKGKSKKLKSVKELLGITIMERSSFEKNPIDFLEAKGYKEVKKDLIIKLPKYSLFELENGRKRMLASAGELQKGNELALPSKYVNFLYLASHYEKLKGSPEDNEQKQLFVEQHKHYLDEIIEQISEFSKRVILADANLDKVLSAYNKHRDKPIREQAENIIHLFTLTNLGAPAAFKYFDTTIDRKRYTSTKEVLDATLIHQSITGLYETRIDLSQLGGDEGADKRTADGSEFESPKKKRKV

SEQ ID NO: 1434 - protein, 1588 aa, synthetic construct
  REGION 1..1588: note = Description of Artificial Sequence: Synthetic polypeptide
MSEVEFSHEYWMRHALTLAKRARDEREVPVGAVLVLNNRVIGEGWNRAIGLHDPTAHAEIMALRQGGLVMQNYRLYDATLYSTFEPCVMCAGAMIHSRIGRVVFGVRNAKTGAAGSLMDVLHHPGMNHRVEITEGILADECAALLCRFFRMPRRVFNAQKKAQSSTDSGGSSGGSSGSETPGTSESATPESSGGSSGGSDKKYSIGLAIGTNSVGWAVITDEYKVPSKKFKVLGNTDRHSIKKNLIGALLFDSGETAEATRLKRTARRRYTRRKNRICYLQEIFSNEMAKVDDSFFHRLEESFLVEEDKKHERHPIFGNIVDEVAYHEKYPTIYHLRKKLVDSTDKADLRLIYLALAHMIKFRGHFLIEGDLNPDNSDVDKLFIQLVQTYNQLFEENPINASGVDAKAILSARLSKSRRLENLIAQLPGEKKNGLFGNLIALSLGLTPNFKSNFDLAEDAKLQLSKDTYDDDLDNLLAQIGDQYADLFLAAKNLSDAILLSDILRVNTEITKAPLSASMIKRYDEHHQDLTLLKALVRQQLPEKYKEIFFDQSKNGYAGYIDGGASQEEFYKFIKPILEKMDGTEELLVKLNREDLLRKQRTFDNGSIPHQIHLGELHAILRRQEDFYPFLKDNREKIEKILTFRIPYYVGPLARGNSRFAWMTRKSEETITPWNFEEVVDKGASAQSFIERMTNFDKNLPNEKVLPKHSLLYEYFTVYNELTKVKYVTEGMRKPAFLSGEQKKAIVDLLFKTNRKVTVKQLKEDYFKKIECFDSVEISGVEDRFNASLGTYHDLLKIIKDKDFLDNEENEDILEDIVLTLTLFEDREMIEERLKTYAHLFDDKVMKQLKRRRYTGWGRLSRKLINGIRDKQSGKTILDFLKSDGFANRNFMQLIHDDSLTFKEDIQKAQVSGQGDSLHEHIANLAGSPAIKKGILQTVKVVDELVKVMGRHKPENIVIEMARENQTTQKGQKNSRERMKRIEEGIKELGSQILKEHPVENTQLQNEKLYLYYLQNGRDMYVDQELDINRLSDYDVDHIVPQSFLKDDSIDNKVLTRSDKNRGKSDNVPSEEVVKKMKNYWRQLLNAKLITQRKFDNLTKAERGGLSELDKAGFIKRQLVETRQITKHVAQILDSRMNTKYDENDKLIREVKVITLKSKLVSDFRKDFQFYKVREINNYHHAHDAYLNAVVGTALIKKYPKLESEFVYGDYKVYDVRKMIAKSEQEIGKATAKYFFYSNIMNFFKTEITLANGEIRKRPLIETNGETGEIVWDKGRDFATVRKVLSMPQVNIVKKTEVQTGGFSKESILPKRNSDKLIARKKDWDPKKYGGFDSPTVAYSVLVVAKVEKGKSKKLKSVKELLGITIMERSSFEKNPIDFLEAKGYKEVKKDLIIKLPKYSLFELENGRKRMLASAGELQKGNELALPSKYVNFLYLASHYEKLKGSPEDNEQKQLFVEQHKHYLDEIIEQISEFSKRVILADANLDKVLSAYNKHRDKPIREQAENIIHLFTLTNLGAPAAFKYFDTTIDRKRYTSTKEVLDATLIHQSITGLYETRIDLSQLGGDEGADKRTADGSEFESPKKKRKV

SEQ ID NO: 1435 - protein, 1786 aa, synthetic construct
  REGION 1..1786: note = Description of Artificial Sequence: Synthetic polypeptide
MSEVEFSHEYWMRHALTLAKRAWDEREVPVGAVLVHNNRVIGEGWNRPIGRHDPTAHAEIMALRQGGLVMQNYRLIDATLYVTLEPCVMCAGAMIHSRIGRVVFGARDAKTGAAGSLMDVLHHPGMNHRVEITEGILADECAALLSDFFRMRRQEIKAQKKAQSSTDSGGSSGGSSGSETPGTSESATPESSGGSSGGSSEVEFSHEYWMRHALTLAKRARDEREVPVGAVLVLNNRVIGEGWNRAIGLHDPTAHAEIMALRQGGLVMQNYRLYDATLYSTFEPCVMCAGAMIHSRIGRVVFGVRNAKTGAAGSLMDVLHHPGMNHRVEITEGILADECAALLCRFFRMPRRVFNAQKKAQSSTDSGGSSGGSSGSETPGTSESATPESSGGSSGGSDKKYSIGLAIGTNSVGWAVITDEYKVPSKKFKVLGNTDRHSIKKNLIGALLFDSGETAEATRLKRTARRRYTRRKNRICYLQEIFSNEMAKVDDSFFHRLEESFLVEEDKKHERHPIFGNIVDEVAYHEKYPTIYHLRKKLVDSTDKADLRLIYLALAHMIKFRGHFLIEGDLNPDNSDVDKLFIQLVQTYNQLFEENPINASGVDAKAILSARLSKSRRLENLIAQLPGEKKNGLFGNLIALSLGLTPNFKSNFDLAEDAKLQLSKDTYDDDLDNLLAQIGDQYADLFLAAKNLSDAILLSDILRVNTEITKAPLSASMIKRYDEHHQDLTLLKALVRQQLPEKYKEIFFDQSKNGYAGYIDGGASQEEFYKFIKPILEKMDGTEELLVKLNREDLLRKQRTFDNGSIPHQIHLGELHAILRRQEDFYPFLKDNREKIEKILTFRIPYYVGPLARGNSRFAWMTRKSEETITPWNFEEVVDKGASAQSFIERMTNFDKNLPNEKVLPKHSLLYEYFTVYNELTKVKYVTEGMRKPAFLSGEQKKAIVDLLFKTNRKVTVKQLKEDYFKKIECFDSVEISGVEDRFNASLGTYHDLLKIIKDKDFLDNEENEDILEDIVLTLTLFEDREMIEERLKTYAHLFDDKVMKQLKRRRYTGWGRLSRKLINGIRDKQSGKTILDFLKSDGFANRNFMQLIHDDSLTFKEDIQKAQVSGQGDSLHEHIANLAGSPAIKKGILQTVKVVDELVKVMGRHKPENIVIEMARENQTTQKGQKNSRERMKRIEEGIKELGSQILKEHPVENTQLQNEKLYLYYLQNGRDMYVDQELDINRLSDYDVDHIVPQSFLKDDSIDNKVLTRSDKNRGKSDNVPSEEVVKKMKNYWRQLLNAKLITQRKFDNLTKAERGGLSELDKAGFIKRQLVETRQITKHVAQILDSRMNTKYDENDKLIREVKVITLKSKLVSDFRKDFQFYKVREINNYHHAHDAYLNAVVGTALIKKYPKLESEFVYGDYKVYDVRKMIAKSEQEIGKATAKYFFYSNIMNFFKTEITLANGEIRKRPLIETNGETGEIVWDKGRDFATVRKVLSMPQVNIVKKTEVQTGGFSKESILPKRNSDKLIARKKDWDPKKYGGFDSPTVAYSVLVVAKVEKGKSKKLKSVKELLGITIMERSSFEKNPIDFLEAKGYKEVKKDLIIKLPKYSLFELENGRKRMLASAGELQKGNELALPSKYVNFLYLASHYEKLKGSPEDNEQKQLFVEQHKHYLDEIIEQISEFSKRVILADANLDKVLSAYNKHRDKPIREQAENIIHLFTLTNLGAPAAFKYFDTTIDRKRYTSTKEVLDATLIHQSITGLYETRIDLSQLGGDEGADKRTADGSEFESPKKKRKV

SEQ ID NO: 1436 - protein, 1588 aa, synthetic construct
  REGION 1..1588: note = Description of Artificial Sequence: Synthetic polypeptide
MSEVEFSHEYWMRHALTLAKRARDEREVPVGAVLVLNNRVIGEGWNRAIGLHDPTAHAEIMALRQGGLVMQNYRLIDATLYVTFEPCVMCAGAMIHSRIGRVVFGVRNAKTGAAGSLMDVLHYPGMNHRVEITEGILADECAALLCTFFRMPRQVFNAQKKAQSSTDSGGSSGGSSGSETPGTSESATPESSGGSSGGSDKKYSIGLAIGTNSVGWAVITDEYKVPSKKFKVLGNTDRHSIKKNLIGALLFDSGETAEATRLKRTARRRYTRRKNRICYLQEIFSNEMAKVDDSFFHRLEESFLVEEDKKHERHPIFGNIVDEVAYHEKYPTIYHLRKKLVDSTDKADLRLIYLALAHMIKFRGHFLIEGDLNPDNSDVDKLFIQLVQTYNQLFEENPINASGVDAKAILSARLSKSRRLENLIAQLPGEKKNGLFGNLIALSLGLTPNFKSNFDLAEDAKLQLSKDTYDDDLDNLLAQIGDQYADLFLAAKNLSDAILLSDILRVNTEITKAPLSASMIKRYDEHHQDLTLLKALVRQQLPEKYKEIFFDQSKNGYAGYIDGGASQEEFYKFIKPILEKMDGTEELLVKLNREDLLRKQRTFDNGSIPHQIHLGELHAILRRQEDFYPFLKDNREKIEKILTFRIPYYVGPLARGNSRFAWMTRKSEETITPWNFEEVVDKGASAQSFIERMTNFDKNLPNEKVLPKHSLLYEYFTVYNELTKVKYVTEGMRKPAFLSGEQKKAIVDLLFKTNRKVTVKQLKEDYFKKIECFDSVEISGVEDRFNASLGTYHDLLKIIKDKDFLDNEENEDILEDIVLTLTLFEDREMIEERLKTYAHLFDDKVMKQLKRRRYTGWGRLSRKLINGIRDKQSGKTILDFLKSDGFANRNFMQLIHDDSLTFKEDIQKAQVSGQGDSLHEHIANLAGSPAIKKGILQTVKVVDELVKVMGRHKPENIVIEMARENQTTQKGQKNSRERMKRIEEGIKELGSQILKEHPVENTQLQNEKLYLYYLQNGRDMYVDQELDINRLSDYDVDHIVPQSFLKDDSIDNKVLTRSDKNRGKSDNVPSEEVVKKMKNYWRQLLNAKLITQRKFDNLTKAERGGLSELDKAGFIKRQLVETRQITKHVAQILDSRMNTKYDENDKLIREVKVITLKSKLVSDFRKDFQFYKVREINNYHHAHDAYLNAVVGTALIKKYPKLESEFVYGDYKVYDVRKMIAKSEQEIGKATAKYFFYSNIMNFFKTEITLANGEIRKRPLIETNGETGEIVWDKGRDFATVRKVLSMPQVNIVKKTEVQTGGFSKESILPKRNSDKLIARKKDWDPKKYGGFVSPTVAYSVLVVAKVEKGKSKKLKSVKELLGITIMERSSFEKNPIDFLEAKGYKEVKKDLIIKLPKYSLFELENGRKRMLASARELQKGNELALPSKYVNFLYLASHYEKLKGSPEDNEQKQLFVEQHKHYLDEIIEQISEFSKRVILADANLDKVLSAYNKHRDKPIREQAENIIHLFTLTNLGAPAAFKYFDTTIDRKQYRSTKEVLDATLIHQSITGLYETRIDLSQLGGDEGADKRTADGSEFESPKKKRKV

SEQ ID NO: 1437 - protein, 1588 aa, synthetic construct
  REGION 1..1588: note = Description of Artificial Sequence: Synthetic polypeptide
MSEVEFSHEYWMRHALTLAKRARDEREVPVGAVLVLNNRVIGEGWNRAIGLHDPTAHAEIMALRQGGLVMQNYRLIDATLYVTFEPCVMCAGAMIHSRIGRVVFGVRNAKTGAAGSLMDVLHYPGMNHRVEITEGILADECAALLCRFFRMPRQVFNAQKKAQSSTDSGGSSGGSSGSETPGTSESATPESSGGSSGGSDKKYSIGLAIGTNSVGWAVITDEYKVPSKKFKVLGNTDRHSIKKNLIGALLFDSGETAEATRLKRTARRRYTRRKNRICYLQEIFSNEMAKVDDSFFHRLEESFLVEEDKKHERHPIFGNIVDEVAYHEKYPTIYHLRKKLVDSTDKADLRLIYLALAHMIKFRGHFLIEGDLNPDNSDVDKLFIQLVQTYNQLFEENPINASGVDAKAILSARLSKSRRLENLIAQLPGEKKNGLFGNLIALSLGLTPNFKSNFDLAEDAKLQLSKDTYDDDLDNLLAQIGDQYADLFLAAKNLSDAILLSDILRVNTEITKAPLSASMIKRYDEHHQDLTLLKALVRQQLPEKYKEIFFDQSKNGYAGYIDGGASQEEFYKFIKPILEKMDGTEELLVKLNREDLLRKQRTFDNGSIPHQIHLGELHAILRRQEDFYPFLKDNREKIEKILTFRIPYYVGPLARGNSRFAWMTRKSEETITPWNFEEVVDKGASAQSFIERMTNFDKNLPNEKVLPKHSLLYEYFTVYNELTKVKYVTEGMRKPAFLSGEQKKAIVDLLFKTNRKVTVKQLKEDYFKKIECFDSVEISGVEDRFNASLGTYHDLLKIIKDKDFLDNEENEDILEDIVLTLTLFEDREMIEERLKTYAHLFDDKVMKQLKRRRYTGWGRLSRKLINGIRDKQSGKTILDFLKSDGFANRNFMQLIHDDSLTFKEDIQKAQVSGQGDSLHEHIANLAGSPAIKKGILQTVKVVDELVKVMGRHKPENIVIEMARENQTTQKGQKNSRERMKRIEEGIKELGSQILKEHPVENTQLQNEKLYLYYLQNGRDMYVDQELDINRLSDYDVDHIVPQSFLKDDSIDNKVLTRSDKNRGKSDNVPSEEVVKKMKNYWRQLLNAKLITQRKFDNLTKAERGGLSELDKAGFIKRQLVETRQITKHVAQILDSRMNTKYDENDKLIREVKVITLKSKLVSDFRKDFQFYKVREINNYHHAHDAYLNAVVGTALIKKYPKLESEFVYGDYKVYDVRKMIAKSEQEIGKATAKYFFYSNIMNFFKTEITLANGEIRKRPLIETNGETGEIVWDKGRDFATVRKVLSMPQVNIVKKTEVQTGGFSKESILPKRNSDKLIARKKDWDPKKYGGFVSPTVAYSVLVVAKVEKGKSKKLKSVKELLGITIMERSSFEKNPIDFLEAKGYKEVKKDLIIKLPKYSLFELENGRKRMLASARELQKGNELALPSKYVNFLYLASHYEKLKGSPEDNEQKQLFVEQHKHYLDEIIEQISEFSKRVILADANLDKVLSAYNKHRDKPIREQAENIIHLFTLTNLGAPAAFKYFDTTIDRKQYRSTKEVLDATLIHQSITGLYETRIDLSQLGGDEGADKRTADGSEFESPKKKRKV

SEQ ID NO: 1438 - protein, 1588 aa, synthetic construct
  REGION 1..1588: note = Description of Artificial Sequence: Synthetic polypeptide
MSEVEFSHEYWMRHALTLAKRARDEREVPVGAVLVLNNRVIGEGWNRAIGLHDPTAHAEIMALRQGGLVMQNYRLIDATLYVTFEPCVMCAGAMIHSRIGRVVFGVRNAKTGAAGSLMDVLHYPGMNHRVEITEGILADECAALLCYFFRMPRSVFNAQKKAQSSTDSGGSSGGSSGSETPGTSESATPESSGGSSGGSDKKYSIGLAIGTNSVGWAVITDEYKVPSKKFKVLGNTDRHSIKKNLIGALLFDSGETAEATRLKRTARRRYTRRKNRICYLQEIFSNEMAKVDDSFFHRLEESFLVEEDKKHERHPIFGNIVDEVAYHEKYPTIYHLRKKLVDSTDKADLRLIYLALAHMIKFRGHFLIEGDLNPDNSDVDKLFIQLVQTYNQLFEENPINASGVDAKAILSARLSKSRRLENLIAQLPGEKKNGLFGNLIALSLGLTPNFKSNFDLAEDAKLQLSKDTYDDDLDNLLAQIGDQYADLFLAAKNLSDAILLSDILRVNTEITKAPLSASMIKRYDEHHQDLTLLKALVRQQLPEKYKEIFFDQSKNGYAGYIDGGASQEEFYKFIKPILEKMDGTEELLVKLNREDLLRKQRTFDNGSIPHQIHLGELHAILRRQEDFYPFLKDNREKIEKILTFRIPYYVGPLARGNSRFAWMTRKSEETITPWNFEEVVDKGASAQSFIERMTNFDKNLPNEKVLPKHSLLYEYFTVYNELTKVKYVTEGMRKPAFLSGEQKKAIVDLLFKTNRKVTVKQLKEDYFKKIECFDSVEISGVEDRFNASLGTYHDLLKIIKDKDFLDNEENEDILEDIVLTLTLFEDREMIEERLKTYAHLFDDKVMKQLKRRRYTGWGRLSRKLINGIRDKQSGKTILDFLKSDGFANRNFMQLIHDDSLTFKEDIQKAQVSGQGDSLHEHIANLAGSPAIKKGILQTVKVVDELVKVMGRHKPENIVIEMARENQTTQKGQKNSRERMKRIEEGIKELGSQILKEHPVENTQLQNEKLYLYYLQNGRDMYVDQELDINRLSDYDVDHIVPQSFLKDDSIDNKVLTRSDKNRGKSDNVPSEEVVKKMKNYWRQLLNAKLITQRKFDNLTKAERGGLSELDKAGFIKRQLVETRQITKHVAQILDSRMNTKYDENDKLIREVKVITLKSKLVSDFRKDFQFYKVREINNYHHAHDAYLNAVVGTALIKKYPKLESEFVYGDYKVYDVRKMIAKSEQEIGKATAKYFFYSNIMNFFKTEITLANGEIRKRPLIETNGETGEIVWDKGRDFATVRKVLSMPQVNIVKKTEVQTGGFSKESILPKRNSDKLIARKKDWDPKKYGGFVSPTVAYSVLVVAKVEKGKSKKLKSVKELLGITIMERSSFEKNPIDFLEAKGYKEVKKDLIIKLPKYSLFELENGRKRMLASARELQKGNELALPSKYVNFLYLASHYEKLKGSPEDNEQKQLFVEQHKHYLDEIIEQISEFSKRVILADANLDKVLSAYNKHRDKPIREQAENIIHLFTLTNLGAPAAFKYFDTTIDRKQYRSTKEVLDATLIHQSITGLYETRIDLSQLGGDEGADKRTADGSEFESPKKKRKV

SEQ ID NO: 1439 - protein, 1588 aa, synthetic construct
  REGION 1..1588: note = Description of Artificial Sequence: Synthetic polypeptide
MSEVEFSHEYWMRHALTLAKRARDEREVPVGAVLVLNNRVIGEGWNRAIGLHDPTAHAEIMALRQGGLVMQNYRLIDATLYVTFEPCVMCAGAMIHSRIGRVVFGVRNAKTGAAGSLMDVLHHPGMNHRVEITEGILADECAALLCYFFRMPRQVFNAQKKAQSSTDSGGSSGGSSGSETPGTSESATPESSGGSSGGSDKKYSIGLAIGTNSVGWAVITDEYKVPSKKFKVLGNTDRHSIKKNLIGALLFDSGETAEATRLKRTARRRYTRRKNRICYLQEIFSNEMAKVDDSFFHRLEESFLVEEDKKHERHPIFGNIVDEVAYHEKYPTIYHLRKKLVDSTDKADLRLIYLALAHMIKFRGHFLIEGDLNPDNSDVDKLFIQLVQTYNQLFEENPINASGVDAKAILSARLSKSRRLENLIAQLPGEKKNGLFGNLIALSLGLTPNFKSNFDLAEDAKLQLSKDTYDDDLDNLLAQIGDQYADLFLAAKNLSDAILLSDILRVNTEITKAPLSASMIKRYDEHHQDLTLLKALVRQQLPEKYKEIFFDQSKNGYAGYIDGGASQEEFYKFIKPILEKMDGTEELLVKLNREDLLRKQRTFDNGSIPHQIHLGELHAILRRQEDFYPFLKDNREKIEKILTFRIPYYVGPLARGNSRFAWMTRKSEETITPWNFEEVVDKGASAQSFIERMTNFDKNLPNEKVLPKHSLLYEYFTVYNELTKVKYVTEGMRKPAFLSGEQKKAIVDLLFKTNRKVTVKQLKEDYFKKIECFDSVEISGVEDRFNASLGTYHDLLKIIKDKDFLDNEENEDILEDIVLTLTLFEDREMIEERLKTYAHLFDDKVMKQLKRRRYTGWGRLSRKLINGIRDKQSGKTILDFLKSDGFANRNFMQLIHDDSLTFKEDIQKAQVSGQGDSLHEHIANLAGSPAIKKGILQTVKVVDELVKVMGRHKPENIVIEMARENQTTQKGQKNSRERMKRIEEGIKELGSQILKEHPVENTQLQNEKLYLYYLQNGRDMYVDQELDINRLSDYDVDHIVPQSFLKDDSIDNKVLTRSDKNRGKSDNVPSEEVVKKMKNYWRQLLNAKLITQRKFDNLTKAERGGLSELDKAGFIKRQLVETRQITKHVAQILDSRMNTKYDENDKLIREVKVITLKSKLVSDFRKDFQFYKVREINNYHHAHDAYLNAVVGTALIKKYPKLESEFVYGDYKVYDVRKMIAKSEQEIGKATAKYFFYSNIMNFFKTEITLANGEIRKRPLIETNGETGEIVWDKGRDFATVRKVLSMPQVNIVKKTEVQTGGFSKESILPKRNSDKLIARKKDWDPKKYGGFVSPTVAYSVLVVAKVEKGKSKKLKSVKELLGITIMERSSFEKNPIDFLEAKGYKEVKKDLIIKLPKYSLFELENGRKRMLASARELQKGNELALPSKYVNFLYLASHYEKLKGSPEDNEQKQLFVEQHKHYLDEIIEQISEFSKRVILADANLDKVLSAYNKHRDKPIREQAENIIHLFTLTNLGAPAAFKYFDTTIDRKQYRSTKEVLDATLIHQSITGLYETRIDLSQLGGDEGADKRTADGSEFESPKKKRKV

SEQ ID NO: 1440 - protein, 1588 aa, synthetic construct
  REGION 1..1588: note = Description of Artificial Sequence: Synthetic polypeptide
MSEVEFSHEYWMRHALTLAKRARDEREVPVGAVLVLNNRVIGEGWNRAIGLHDPTAHAEIMALRQGGLVMQNYRLIDATLYSTFEPCVMCAGAMIHSRIGRVVFGVRNAKTGAAGSLMDVLHYPGMNHRVEITEGILADECAALLCYFFRMPRQVFNAQKKAQSSTDSGGSSGGSSGSETPGTSESATPESSGGSSGGSDKKYSIGLAIGTNSVGWAVITDEYKVPSKKFKVLGNTDRHSIKKNLIGALLFDSGETAEATRLKRTARRRYTRRKNRICYLQEIFSNEMAKVDDSFFHRLEESFLVEEDKKHERHPIFGNIVDEVAYHEKYPTIYHLRKKLVDSTDKADLRLIYLALAHMIKFRGHFLIEGDLNPDNSDVDKLFIQLVQTYNQLFEENPINASGVDAKAILSARLSKSRRLENLIAQLPGEKKNGLFGNLIALSLGLTPNFKSNFDLAEDAKLQLSKDTYDDDLDNLLAQIGDQYADLFLAAKNLSDAILLSDILRVNTEITKAPLSASMIKRYDEHHQDLTLLKALVRQQLPEKYKEIFFDQSKNGYAGYIDGGASQEEFYKFIKPILEKMDGTEELLVKLNREDLLRKQRTFDNGSIPHQIHLGELHAILRRQEDFYPFLKDNREKIEKILTFRIPYYVGPLARGNSRFAWMTRKSEETITPWNFEEVVDKGASAQSFIERMTNFDKNLPNEKVLPKHSLLYEYFTVYNELTKVKYVTEGMRKPAFLSGEQKKAIVDLLFKTNRKVTVKQLKEDYFKKIECFDSVEISGVEDRFNASLGTYHDLLKIIKDKDFLDNEENEDILEDIVLTLTLFEDREMIEERLKTYAHLFDDKVMKQLKRRRYTGWGRLSRKLINGIRDKQSGKTILDFLKSDGFANRNFMQLIHDDSLTFKEDIQKAQVSGQGDSLHEHIANLAGSPAIKKGILQTVKVVDELVKVMGRHKPENIVIEMARENQTTQKGQKNSRERMKRIEEGIKELGSQILKEHPVENTQLQNEKLYLYYLQNGRDMYVDQELDINRLSDYDVDHIVPQSFLKDDSIDNKVLTRSDKNRGKSDNVPSEEVVKKMKNYWRQLLNAKLITQRKFDNLTKAERGGLSELDKAGFIKRQLVETRQITKHVAQILDSRMNTKYDENDKLIREVKVITLKSKLVSDFRKDFQFYKVREINNYHHAHDAYLNAVVGTALIKKYPKLESEFVYGDYKVYDVRKMIAKSEQEIGKATAKYFFYSNIMNFFKTEITLANGEIRKRPLIETNGETGEIVWDKGRDFATVRKVLSMPQVNIVKKTEVQTGGFSKESILPKRNSDKLIARKKDWDPKKYGGFVSPTVAYSVLVVAKVEKGKSKKLKSVKELLGITIMERSSFEKNPIDFLEAKGYKEVKKDLIIKLPKYSLFELENGRKRMLASARELQKGNELALPSKYVNFLYLASHYEKLKGSPEDNEQKQLFVEQHKHYLDEIIEQISEFSKRVILADANLDKVLSAYNKHRDKPIREQAENIIHLFTLTNLGAPAAFKYFDTTIDRKQYRSTKEVLDATLIHQSITGLYETRIDLSQLGGDEGADKRTADGSEFESPKKKRKV

SEQ ID NO: 1441 - protein, 1588 aa, synthetic construct
  REGION 1..1588: note = Description of Artificial Sequence: Synthetic polypeptide
MSEVEFSHEYWMRHALTLAKRARDEREVPVGAVLVLNNRVIGEGWNRAIGLHDPTAHAEIMALRQGGLVMQNYRLIDATLYVTFEPCVMCAGAMIHSRIGRVVFGVRNAKTGAAGSLMDVLHYPGMNHRVEITEGILADECAALLCYFFRMPRQVFNAQKKAQSSRDSGGSSGGSSGSETPGTSESATPESSGGSSGGSDKKYSIGLAIGTNSVGWAVITDEYKVPSKKFKVLGNTDRHSIKKNLIGALLFDSGETAEATRLKRTARRRYTRRKNRICYLQEIFSNEMAKVDDSFFHRLEESFLVEEDKKHERHPIFGNIVDEVAYHEKYPTIYHLRKKLVDSTDKADLRLIYLALAHMIKFRGHFLIEGDLNPDNSDVDKLFIQLVQTYNQLFEENPINASGVDAKAILSARLSKSRRLENLIAQLPGEKKNGLFGNLIALSLGLTPNFKSNFDLAEDAKLQLSKDTYDDDLDNLLAQIGDQYADLFLAAKNLSDAILLSDILRVNTEITKAPLSASMIKRYDEHHQDLTLLKALVRQQLPEKYKEIFFDQSKNGYAGYIDGGASQEEFYKFIKPILEKMDGTEELLVKLNREDLLRKQRTFDNGSIPHQIHLGELHAILRRQEDFYPFLKDNREKIEKILTFRIPYYVGPLARGNSRFAWMTRKSEETITPWNFEEVVDKGASAQSFIERMTNFDKNLPNEKVLPKHSLLYEYFTVYNELTKVKYVTEGMRKPAFLSGEQKKAIVDLLFKTNRKVTVKQLKEDYFKKIECFDSVEISGVEDRFNASLGTYHDLLKIIKDKDFLDNEENEDILEDIVLTLTLFEDREMIEERLKTYAHLFDDKVMKQLKRRRYTGWGRLSRKLINGIRDKQSGKTILDFLKSDGFANRNFMQLIHDDSLTFKEDIQKAQVSGQGDSLHEHIANLAGSPAIKKGILQTVKVVDELVKVMGRHKPENIVIEMARENQTTQKGQKNSRERMKRIEEGIKELGSQILKEHPVENTQLQNEKLYLYYLQNGRDMYVDQELDINRLSDYDVDHIVPQSFLKDDSIDNKVLTRSDKNRGKSDNVPSEEVVKKMKNYWRQLLNAKLITQRKFDNLTKAERGGLSELDKAGFIKRQLVETRQITKHVAQILDSRMNTKYDENDKLIREVKVITLKSKLVSDFRKDFQFYKVREINNYHHAHDAYLNAVVGTALIKKYPKLESEFVYGDYKVYDVRKMIAKSEQEIGKATAKYFFYSNIMNFFKTEITLANGEIRKRPLIETNGETGEIVWDKGRDFATVRKVLSMPQVNIVKKTEVQTGGFSKESILPKRNSDKLIARKKDWDPKKYGGFVSPTVAYSVLVVAKVEKGKSKKLKSVKELLGITIMERSSFEKNPIDFLEAKGYKEVKKDLIIKLPKYSLFELENGRKRMLASARELQKGNELALPSKYVNFLYLASHYEKLKGSPEDNEQKQLFVEQHKHYLDEIIEQISEFSKRVILADANLDKVLSAYNKHRDKPIREQAENIIHLFTLTNLGAPAAFKYFDTTIDRKQYRSTKEVLDATLIHQSITGLYETRIDLSQLGGDEGADKRTADGSEFESPKKKRKV

SEQ ID NO: 1442 - protein, 1588 aa, synthetic construct
  REGION 1..1588: note = Description of Artificial Sequence: Synthetic polypeptide
MSEVEFSHEYWMRHALTLAKRARDEREVPVGAVLVLNNRVIGEGWNRAIGLHDPTAHAEIMALRQGGLVMQNYRLIDATLYVTFEPCVMCAGAMIHSRIGRVVFGVRNAKTGAAGSLMDVLHYPGMNHRVEITEGILADECAALLCYFFRMPRRVFNAQKKAQSSTDSGGSSGGSSGSETPGTSESATPESSGGSSGGSDKKYSIGLAIGTNSVGWAVITDEYKVPSKKFKVLGNTDRHSIKKNLIGALLFDSGETAEATRLKRTARRRYTRRKNRICYLQEIFSNEMAKVDDSFFHRLEESFLVEEDKKHERHPIFGNIVDEVAYHEKYPTIYHLRKKLVDSTDKADLRLIYLALAHMIKFRGHFLIEGDLNPDNSDVDKLFIQLVQTYNQLFEENPINASGVDAKAILSARLSKSRRLENLIAQLPGEKKNGLFGNLIALSLGLTPNFKSNFDLAEDAKLQLSKDTYDDDLDNLLAQIGDQYADLFLAAKNLSDAILLSDILRVNTEITKAPLSASMIKRYDEHHQDLTLLKALVRQQLPEKYKEIFFDQSKNGYAGYIDGGASQEEFYKFIKPILEKMDGTEELLVKLNREDLLRKQRTFDNGSIPHQIHLGELHAILRRQEDFYPFLKDNREKIEKILTFRIPYYVGPLARGNSRFAWMTRKSEETITPWNFEEVVDKGASAQSFIERMTNFDKNLPNEKVLPKHSLLYEYFTVYNELTKVKYVTEGMRKPAFLSGEQKKAIVDLLFKTNRKVTVKQLKEDYFKKIECFDSVEISGVEDRFNASLGTYHDLLKIIKDKDFLDNEENEDILEDIVLTLTLFEDREMIEERLKTYAHLFDDKVMKQLKRRRYTGWGRLSRKLINGIRDKQSGKTILDFLKSDGFANRNFMQLIHDDSLTFKEDIQKAQVSGQGDSLHEHIANLAGSPAIKKGILQTVKVVDELVKVMGRHKPENIVIEMARENQTTQKGQKNSRERMKRIEEGIKELGSQILKEHPVENTQLQNEKLYLYYLQNGRDMYVDQELDINRLSDYDVDHIVPQSFLKDDSIDNKVLTRSDKNRGKSDNVPSEEVVKKMKNYWRQLLNAKLITQRKFDNLTKAERGGLSELDKAGFIKRQLVETRQITKHVAQILDSRMNTKYDENDKLIREVKVITLKSKLVSDFRKDFQFYKVREINNYHHAHDAYLNAVVGTALIKKYPKLESEFVYGDYKVYDVRKMIAKSEQEIGKATAKYFFYSNIMNFFKTEITLANGEIRKRPLIETNGETGEIVWDKGRDFATVRKVLSMPQVNIVKKTEVQTGGFSKESILPKRNSDKLIARKKDWDPKKYGGFVSPTVAYSVLVVAKVEKGKSKKLKSVKELLGITIMERSSFEKNPIDFLEAKGYKEVKKDLIIKLPKYSLFELENGRKRMLASARELQKGNELALPSKYVNFLYLASHYEKLKGSPEDNEQKQLFVEQHKHYLDEIIEQISEFSKRVILADANLDKVLSAYNKHRDKPIREQAENIIHLFTLTNLGAPAAFKYFDTTIDRKQYRSTKEVLDATLIHQSITGLYETRIDLSQLGGDEGADKRTADGSEFESPKKKRKV

SEQ ID NO: 1443 - protein, 1588 aa, synthetic construct
  REGION 1..1588: note = Description of Artificial Sequence: Synthetic polypeptide
MSEVEFSHEYWMRHALTLAKRARDEREVPVGAVLVLNNRVIGEGWNRAIGLHDPTAHAEIMALRQGGLVMQNYRLIDATLYVTFEPCVMCAGAMIHSRIGRVVFGVRNAKTGAAGSLMDVLHHPGMNHRVEITEGILADECAALLCRFFRMPRRVFNAQKKAQSSTDSGGSSGGSSGSETPGTSESATPESSGGSSGGSDKKYSIGLAIGTNSVGWAVITDEYKVPSKKFKVLGNTDRHSIKKNLIGALLFDSGETAEATRLKRTARRRYTRRKNRICYLQEIFSNEMAKVDDSFFHRLEESFLVEEDKKHERHPIFGNIVDEVAYHEKYPTIYHLRKKLVDSTDKADLRLIYLALAHMIKFRGHFLIEGDLNPDNSDVDKLFIQLVQTYNQLFEENPINASGVDAKAILSARLSKSRRLENLIAQLPGEKKNGLFGNLIALSLGLTPNFKSNFDLAEDAKLQLSKDTYDDDLDNLLAQIGDQYADLFLAAKNLSDAILLSDILRVNTEITKAPLSASMIKRYDEHHQDLTLLKALVRQQLPEKYKEIFFDQSKNGYAGYIDGGASQEEFYKFIKPILEKMDGTEELLVKLNREDLLRKQRTFDNGSIPHQIHLGELHAILRRQEDFYPFLKDNREKIEKILTFRIPYYVGPLARGNSRFAWMTRKSEETITPWNFEEVVDKGASAQSFIERMTNFDKNLPNEKVLPKHSLLYEYFTVYNELTKVKYVTEGMRKPAFLSGEQKKAIVDLLFKTNRKVTVKQLKEDYFKKIECFDSVEISGVEDRFNASLGTYHDLLKIIKDKDFLDNEENEDILEDIVLTLTLFEDREMIEERLKTYAHLFDDKVMKQLKRRRYTGWGRLSRKLINGIRDKQSGKTILDFLKSDGFANRNFMQLIHDDSLTFKEDIQKAQVSGQGDSLHEHIANLAGSPAIKKGILQTVKVVDELVKVMGRHKPENIVIEMARENQTTQKGQKNSRERMKRIEEGIKELGSQILKEHPVENTQLQNEKLYLYYLQNGRDMYVDQELDINRLSDYDVDHIVPQSFLKDDSIDNKVLTRSDKNRGKSDNVPSEEVVKKMKNYWRQLLNAKLITQRKFDNLTKAERGGLSELDKAGFIKRQLVETRQITKHVAQILDSRMNTKYDENDKLIREVKVITLKSKLVSDFRKDFQFYKVREINNYHHAHDAYLNAVVGTALIKKYPKLESEFVYGDYKVYDVRKMIAKSEQEIGKATAKYFFYSNIMNFFKTEITLANGEIRKRPLIETNGETGEIVWDKGRDFATVRKVLSMPQVNIVKKTEVQTGGFSKESILPKRNSDKLIARKKDWDPKKYGGFVSPTVAYSVLVVAKVEKGKSKKLKSVKELLGITIMERSSFEKNPIDFLEAKGYKEVKKDLIIKLPKYSLFELENGRKRMLASARELQKGNELALPSKYVNFLYLASHYEKLKGSPEDNEQKQLFVEQHKHYLDEIIEQISEFSKRVILADANLDKVLSAYNKHRDKPIREQAENIIHLFTLTNLGAPAAFKYFDTTIDRKQYRSTKEVLDATLIHQSITGLYETRIDLSQLGGDEGADKRTADGSEFESPKKKRKV

SEQ ID NO: 1444 - protein, 1588 aa, synthetic construct
  REGION 1..1588: note = Description of Artificial Sequence: Synthetic polypeptide
MSEVEFSHEYWMRHALTLAKRARDEREVPVGAVLVLNNRVIGEGWNRAIGLHDPTAHAEIMALRQGGLVMQNYRLYDATLYVTFEPCVMCAGAMIHSRIGRVVFGVRNAKTGAAGSLMDVLHYPGMNHRVEITEGILADECAALLCRFFRMPRRVFNAQKKAQSSTDSGGSSGGSSGSETPGTSESATPESSGGSSGGSDKKYSIGLAIGTNSVGWAVITDEYKVPSKKFKVLGNTDRHSIKKNLIGALLFDSGETAEATRLKRTARRRYTRRKNRICYLQEIFSNEMAKVDDSFFHRLEESFLVEEDKKHERHPIFGNIVDEVAYHEKYPTIYHLRKKLVDSTDKADLRLIYLALAHMIKFRGHFLIEGDLNPDNSDVDKLFIQLVQTYNQLFEENPINASGVDAKAILSARLSKSRRLENLIAQLPGEKKNGLFGNLIALSLGLTPNFKSNFDLAEDAKLQLSKDTYDDDLDNLLAQIGDQYADLFLAAKNLSDAILLSDILRVNTEITKAPLSASMIKRYDEHHQDLTLLKALVRQQLPEKYKEIFFDQSKNGYAGYIDGGASQEEFYKFIKPILEKMDGTEELLVKLNREDLLRKQRTFDNGSIPHQIHLGELHAILRRQEDFYPFLKDNREKIEKILTFRIPYYVGPLARGNSRFAWMTRKSEETITPWNFEEVVDKGASAQSFIERMTNFDKNLPNEKVLPKHSLLYEYFTVYNELTKVKYVTEGMRKPAFLSGEQKKAIVDLLFKTNRKVTVKQLKEDYFKKIECFDSVEISGVEDRFNASLGTYHDLLKIIKDKDFLDNEENEDILEDIVLTLTLFEDREMIEERLKTYAHLFDDKVMKQLKRRRYTGWGRLSRKLINGIRDKQSGKTILDFLKSDGFANRNFMQLIHDDSLTFKEDIQKAQVSGQGDSLHEHIANLAGSPAIKKGILQTVKVVDELVKVMGRHKPENIVIEMARENQTTQKGQKNSRERMKRIEEGIKELGSQILKEHPVENTQLQNEKLYLYYLQNGRDMYVDQELDINRLSDYDVDHIVPQSFLKDDSIDNKVLTRSDKNRGKSDNVPSEEVVKKMKNYWRQLLNAKLITQRKFDNLTKAERGGLSELDKAGFIKRQLVETRQITKHVAQILDSRMNTKYDENDKLIREVKVITLKSKLVSDFRKDFQFYKVREINNYHHAHDAYLNAVVGTALIKKYPKLESEFVYGDYKVYDVRKMIAKSEQEIGKATAKYFFYSNIMNFFKTEITLANGEIRKRPLIETNGETGEIVWDKGRDFATVRKVLSMPQVNIVKKTEVQTGGFSKESILPKRNSDKLIARKKDWDPKKYGGFVSPTVAYSVLVVAKVEKGKSKKLKSVKELLGITIMERSSFEKNPIDFLEAKGYKEVKKDLIIKLPKYSLFELENGRKRMLASARELQKGNELALPSKYVNFLYLASHYEKLKGSPEDNEQKQLFVEQHKHYLDEIIEQISEFSKRVILADANLDKVLSAYNKHRDKPIREQAENIIHLFTLTNLGAPAAFKYFDTTIDRKQYRSTKEVLDATLIHQSITGLYETRIDLSQLGGDEGADKRTADGSEFESPKKKRKV

SEQ ID NO: 1445 - protein, 1588 aa, synthetic construct
  REGION 1..1588: note = Description of Artificial Sequence: Synthetic polypeptide
MSEVEFSHEYWMRHALTLAKRARDEREVPVGAVLVLNNRVIGEGWNRAIGLHDPTAHAEIMALRQGGLVMQNYRLIDATLYVTFEPCVMCAGAMIHSRIGRVVFGVRNAKTGAAGSLMDVLHYPGMNHRVEITEGILADECAALLCRFFRMPRRVFNAQKKAQSSRDSGGSSGGSSGSETPGTSESATPESSGGSSGGSDKKYSIGLAIGTNSVGWAVITDEYKVPSKKFKVLGNTDRHSIKKNLIGALLFDSGETAEATRLKRTARRRYTRRKNRICYLQEIFSNEMAKVDDSFFHRLEESFLVEEDKKHERHPIFGNIVDEVAYHEKYPTIYHLRKKLVDSTDKADLRLIYLALAHMIKFRGHFLIEGDLNPDNSDVDKLFIQLVQTYNQLFEENPINASGVDAKAILSARLSKSRRLENLIAQLPGEKKNGLFGNLIALSLGLTPNFKSNFDLAEDAKLQLSKDTYDDDLDNLLAQIGDQYADLFLAAKNLSDAILLSDILRVNTEITKAPLSASMIKRYDEHHQDLTLLKALVRQQLPEKYKEIFFDQSKNGYAGYIDGGASQEEFYKFIKPILEKMDGTEELLVKLNREDLLRKQRTFDNGSIPHQIHLGELHAILRRQEDFYPFLKDNREKIEKILTFRIPYYVGPLARGNSRFAWMTRKSEETITPWNFEEVVDKGASAQSFIERMTNFDKNLPNEKVLPKHSLLYEYFTVYNELTKVKYVTEGMRKPAFLSGEQKKAIVDLLFKTNRKVTVKQLKEDYFKKIECFDSVEISGVEDRFNASLGTYHDLLKIIKDKDFLDNEENEDILEDIVLTLTLFEDREMIEERLKTYAHLFDDKVMKQLKRRRYTGWGRLSRKLINGIRDKQSGKTILDFLKSDGFANRNFMQLIHDDSLTFKEDIQKAQVSGQGDSLHEHIANLAGSPAIKKGILQTVKVVDELVKVMGRHKPENIVIEMARENQTTQKGQKNSRERMKRIEEGIKELGSQILKEHPVENTQLQNEKLYLYYLQNGRDMYVDQELDINRLSDYDVDHIVPQSFLKDDSIDNKVLTRSDKNRGKSDNVPSEEVVKKMKNYWRQLLNAKLITQRKFDNLTKAERGGLSELDKAGFIKRQLVETRQITKHVAQILDSRMNTKYDENDKLIREVKVITLKSKLVSDFRKDFQFYKVREINNYHHAHDAYLNAVVGTALIKKYPKLESEFVYGDYKVYDVRKMIAKSEQEIGKATAKYFFYSNIMNFFKTEITLANGEIRKRPLIETNGETGEIVWDKGRDFATVRKVLSMPQVNIVKKTEVQTGGFSKESILPKRNSDKLIARKKDWDPKKYGGFVSPTVAYSVLVVAKVEKGKSKKLKSVKELLGITIMERSSFEKNPIDFLEAKGYKEVKKDLIIKLPKYSLFELENGRKRMLASARELQKGNELALPSKYVNFLYLASHYEKLKGSPEDNEQKQLFVEQHKHYLDEIIEQISEFSKRVILADANLDKVLSAYNKHRDKPIREQAENIIHLFTLTNLGAPAAFKYFDTTIDRKQYRSTKEVLDATLIHQSITGLYETRIDLSQLGGDEGADKRTADGSEFESPKKKRKV

SEQ ID NO: 1446 - protein, 1588 aa, synthetic construct
  REGION 1..1588: note = Description of Artificial Sequence: Synthetic polypeptide
MSEVEFSHEYWMRHALTLAKRARDEREVPVGAVLVLNNRVIGEGWNRAIGLHDPTAHAEIMALRQGGLVMQNYRLIDATLYVTFEPCVMCAGAMIHSRIGRVVFGVRNAKTGAAGSLMDVLHYPGMNHRVEITEGILADECAALLCTFFRMPRRVFNAQKKAQSSTDSGGSSGGSSGSETPGTSESATPESSGGSSGGSDKKYSIGLAIGTNSVGWAVITDEYKVPSKKFKVLGNTDRHSIKKNLIGALLFDSGETAEATRLKRTARRRYTRRKNRICYLQEIFSNEMAKVDDSFFHRLEESFLVEEDKKHERHPIFGNIVDEVAYHEKYPTIYHLRKKLVDSTDKADLRLIYLALAHMIKFRGHFLIEGDLNPDNSDVDKLFIQLVQTYNQLFEENPINASGVDAKAILSARLSKSRRLENLIAQLPGEKKNGLFGNLIALSLGLTPNFKSNFDLAEDAKLQLSKDTYDDDLDNLLAQIGDQYADLFLAAKNLSDAILLSDILRVNTEITKAPLSASMIKRYDEHHQDLTLLKALVRQQLPEKYKEIFFDQSKNGYAGYIDGGASQEEFYKFIKPILEKMDGTEELLVKLNREDLLRKQRTFDNGSIPHQIHLGELHAILRRQEDFYPFLKDNREKIEKILTFRIPYYVGPLARGNSRFAWMTRKSEETITPWNFEEVVDKGASAQSFIERMTNFDKNLPNEKVLPKHSLLYEYFTVYNELTKVKYVTEGMRKPAFLSGEQKKAIVDLLFKTNRKVTVKQLKEDYFKKIECFDSVEISGVEDRFNASLGTYHDLLKIIKDKDFLDNEENEDILEDIVLTLTLFEDREMIEERLKTYAHLFDDKVMKQLKRRRYTGWGRLSRKLINGIRDKQSGKTILDFLKSDGFANRNFMQLIHDDSLTFKEDIQKAQVSGQGDSLHEHIANLAGSPAIKKGILQTVKVVDELVKVMGRHKPENIVIEMARENQTTQKGQKNSRERMKRIEEGIKELGSQILKEHPVENTQLQNEKLYLYYLQNGRDMYVDQELDINRLSDYDVDHIVPQSFLKDDSIDNKVLTRSDKNRGKSDNVPSEEVVKKMKNYWRQLLNAKLITQRKFDNLTKAERGGLSELDKAGFIKRQLVETRQITKHVAQILDSRMNTKYDENDKLIREVKVITLKSKLVSDFRKDFQFYKVREINNYHHAHDAYLNAVVGTALIKKYPKLESEFVYGDYKVYDVRKMIAKSEQEIGKATAKYFFYSNIMNFFKTEITLANGEIRKRPLIETNGETGEIVWDKGRDFATVRKVLSMPQVNIVKKTEVQTGGFSKESILPKRNSDKLIARKKDWDPKKYGGFVSPTVAYSVLVVAKVEKGKSKKLKSVKELLGITIMERSSFEKNPIDFLEAKGYKEVKKDLIIKLPKYSLFELENGRKRMLASARELQKGNELALPSKYVNFLYLASHYEKLKGSPEDNEQKQLFVEQHKHYLDEIIEQISEFSKRVILADANLDKVLSAYNKHRDKPIREQAENIIHLFTLTNLGAPAAFKYFDTTIDRKQYRSTKEVLDATLIHQSITGLYETRIDLSQLGGDEGADKRTADGSEFESPKKKRKV

SEQ ID NO: 1447 - protein, 1588 aa, synthetic construct
  REGION 1..1588: note = Description of Artificial Sequence: Synthetic polypeptide
MSEVEFSHEYWMRHALTLAKRARDEREVPVGAVLVLNNRVIGEGWNRAIGLHDPTAHAEIMALRQGGLVMQNYRLIDATLYVTFEPCVMCAGAMIHSRIGRVVFGVRNAKTGAAGSLMDVLHYPGMNHRVEITEGILADECAALLCTFFRMPRSVFNAQKKAQSSTDSGGSSGGSSGSETPGTSESATPESSGGSSGGSDKKYSIGLAIGTNSVGWAVITDEYKVPSKKFKVLGNTDRHSIKKNLIGALLFDSGETAEATRLKRTARRRYTRRKNRICYLQEIFSNEMAKVDDSFFHRLEESFLVEEDKKHERHPIFGNIVDEVAYHEKYPTIYHLRKKLVDSTDKADLRLIYLALAHMIKFRGHFLIEGDLNPDNSDVDKLFIQLVQTYNQLFEENPINASGVDAKAILSARLSKSRRLENLIAQLPGEKKNGLFGNLIALSLGLTPNFKSNFDLAEDAKLQLSKDTYDDDLDNLLAQIGDQYADLFLAAKNLSDAILLSDILRVNTEITKAPLSASMIKRYDEHHQDLTLLKALVRQQLPEKYKEIFFDQSKNGYAGYIDGGASQEEFYKFIKPILEKMDGTEELLVKLNREDLLRKQRTFDNGSIPHQIHLGELHAILRRQEDFYPFLKDNREKIEKILTFRIPYYVGPLARGNSRFAWMTRKSEETITPWNFEEVVDKGASAQSFIERMTNFDKNLPNEKVLPKHSLLYEYFTVYNELTKVKYVTEGMRKPAFLSGEQKKAIVDLLFKTNRKVTVKQLKEDYFKKIECFDSVEISGVEDRFNASLGTYHDLLKIIKDKDFLDNEENEDILEDIVLTLTLFEDREMIEERLKTYAHLFDDKVMKQLKRRRYTGWGRLSRKLINGIRDKQSGKTILDFLKSDGFANRNFMQLIHDDSLTFKEDIQKAQVSGQGDSLHEHIANLAGSPAIKKGILQTVKVVDELVKVMGRHKPENIVIEMARENQTTQKGQKNSRERMKRIEEGIKELGSQILKEHPVENTQLQNEKLYLYYLQNGRDMYVDQELDINRLSDYDVDHIVPQSFLKDDSIDNKVLTRSDKNRGKSDNVPSEEVVKKMKNYWRQLLNAKLITQRKFDNLTKAERGGLSELDKAGFIKRQLVETRQITKHVAQILDSRMNTKYDENDKLIREVKVITLKSKLVSDFRKDFQFYKVREINNYHHAHDAYLNAVVGTALIKKYPKLESEFVYGDYKVYDVRKMIAKSEQEIGKATAKYFFYSNIMNFFKTEITLANGEIRKRPLIETNGETGEIVWDKGRDFATVRKVLSMPQVNIVKKTEVQTGGFSKESILPKRNSDKLIARKKDWDPKKYGGFVSPTVAYSVLVVAKVEKGKSKKLKSVKELLGITIMERSSFEKNPIDFLEAKGYKEVKKDLIIKLPKYSLFELENGRKRMLASARELQKGNELALPSKYVNFLYLASHYEKLKGSPEDNEQKQLFVEQHKHYLDEIIEQISEFSKRVILADANLDKVLSAYNKHRDKPIREQAENIIHLFTLTNLGAPAAFKYFDTTIDRKQYRSTKEVLDATLIHQSITGLYETRIDLSQLGGDEGADKRTADGSEFESPKKKRKV

SEQ ID NO: 1448 - protein, 1588 aa, synthetic construct
  REGION 1..1588: note = Description of Artificial Sequence: Synthetic polypeptide
MSEVEFSHEYWMRHALTLAKRARDEREVPVGAVLVLNNRVIGEGWNRAIGLHDPTAHAEIMALRQGGLVMQNYRLYDATLYVTFEPCVMCAGAMIHSRIGRVVFGVRNAKTGAAGSLMDVLHHPGMNHRVEITEGILADECAALLCRFFRMPRRVFNAQKKAQSSTDSGGSSGGSSGSETPGTSESATPESSGGSSGGSDKKYSIGLAIGTNSVGWAVITDEYKVPSKKFKVLGNTDRHSIKKNLIGALLFDSGETAEATRLKRTARRRYTRRKNRICYLQEIFSNEMAKVDDSFFHRLEESFLVEEDKKHERHPIFGNIVDEVAYHEKYPTIYHLRKKLVDSTDKADLRLIYLALAHMIKFRGHFLIEGDLNPDNSDVDKLFIQLVQTYNQLFEENPINASGVDAKAILSARLSKSRRLENLIAQLPGEKKNGLFGNLIALSLGLTPNFKSNFDLAEDAKLQLSKDTYDDDLDNLLAQIGDQYADLFLAAKNLSDAILLSDILRVNTEITKAPLSASMIKRYDEHHQDLTLLKALVRQQLPEKYKEIFFDQSKNGYAGYIDGGASQEEFYKFIKPILEKMDGTEELLVKLNREDLLRKQRTFDNGSIPHQIHLGELHAILRRQEDFYPFLKDNREKIEKILTFRIPYYVGPLARGNSRFAWMTRKSEETITPWNFEEVVDKGASAQSFIERMTNFDKNLPNEKVLPKHSLLYEYFTVYNELTKVKYVTEGMRKPAFLSGEQKKAIVDLLFKTNRKVTVKQLKEDYFKKIECFDSVEISGVEDRFNASLGTYHDLLKIIKDKDFLDNEENEDILEDIVLTLTLFEDREMIEERLKTYAHLFDDKVMKQLKRRRYTGWGRLSRKLINGIRDKQSGKTILDFLKSDGFANRNFMQLIHDDSLTFKEDIQKAQVSGQGDSLHEHIANLAGSPAIKKGILQTVKVVDELVKVMGRHKPENIVIEMARENQTTQKGQKNSRERMKRIEEGIKELGSQILKEHPVENTQLQNEKLYLYYLQNGRDMYVDQELDINRLSDYDVDHIVPQSFLKDDSIDNKVLTRSDKNRGKSDNVPSEEVVKKMKNYWRQLLNAKLITQRKFDNLTKAERGGLSELDKAGFIKRQLVETRQITKHVAQILDSRMNTKYDENDKLIREVKVITLKSKLVSDFRKDFQFYKVREINNYHHAHDAYLNAVVGTALIKKYPKLESEFVYGDYKVYDVRKMIAKSEQEIGKATAKYFFYSNIMNFFKTEITLANGEIRKRPLIETNGETGEIVWDKGRDFATVRKVLSMPQVNIVKKTEVQTGGFSKESILPKRNSDKLIARKKDWDPKKYGGFVSPTVAYSVLVVAKVEKGKSKKLKSVKELLGITIMERSSFEKNPIDFLEAKGYKEVKKDLIIKLPKYSLFELENGRKRMLASARELQKGNELALPSKYVNFLYLASHYEKLKGSPEDNEQKQLFVEQHKHYLDEIIEQISEFSKRVILADANLDKVLSAYNKHRDKPIREQAENIIHLFTLTNLGAPAAFKYFDTTIDRKQYRSTKEVLDATLIHQSITGLYETRIDLSQLGGDEGADKRTADGSEFESPKKKRKV

SEQ ID NO: 1449 - protein, 1588 aa, synthetic construct
  REGION 1..1588: note = Description of Artificial Sequence: Synthetic polypeptide
MSEVEFSHEYWMRHALTLAKRARDEREVPVGAVLVLNNRVIGEGWNRAIGLHDPTAHAEIMALRQGGLVMQNYRLIDATLYSTFEPCVMCAGAMIHSRIGRVVFGVRNAKTGAAGSLMDVLHYPGMNHRVEITEGILADECAALLCYFFRMPRRVFNAQKKAQSSTDSGGSSGGSSGSETPGTSESATPESSGGSSGGSDKKYSIGLAIGTNSVGWAVITDEYKVPSKKFKVLGNTDRHSIKKNLIGALLFDSGETAEATRLKRTARRRYTRRKNRICYLQEIFSNEMAKVDDSFFHRLEESFLVEEDKKHERHPIFGNIVDEVAYHEKYPTIYHLRKKLVDSTDKADLRLIYLALAHMIKFRGHFLIEGDLNPDNSDVDKLFIQLVQTYNQLFEENPINASGVDAKAILSARLSKSRRLENLIAQLPGEKKNGLFGNLIALSLGLTPNFKSNFDLAEDAKLQLSKDTYDDDLDNLLAQIGDQYADLFLAAKNLSDAILLSDILRVNTEITKAPLSASMIKRYDEHHQDLTLLKALVRQQLPEKYKEIFFDQSKNGYAGYIDGGASQEEFYKFIKPILEKMDGTEELLVKLNREDLLRKQRTFDNGSIPHQIHLGELHAILRRQEDFYPFLKDNREKIEKILTFRIPYYVGPLARGNSRFAWMTRKSEETITPWNFEEVVDKGASAQSFIERMTNFDKNLPNEKVLPKHSLLYEYFTVYNELTKVKYVTEGMRKPAFLSGEQKKAIVDLLFKTNRKVTVKQLKEDYFKKIECFDSVEISGVEDRFNASLGTYHDLLKIIKDKDFLDNEENEDILEDIVLTLTLFEDREMIEERLKTYAHLFDDKVMKQLKRRRYTGWGRLSRKLINGIRDKQSGKTILDFLKSDGFANRNFMQLIHDDSLTFKEDIQKAQVSGQGDSLHEHIANLAGSPAIKKGILQTVKVVDELVKVMGRHKPENIVIEMARENQTTQKGQKNSRERMKRIEEGIKELGSQILKEHPVENTQLQNEKLYLYYLQNGRDMYVDQELDINRLSDYDVDHIVPQSFLKDDSIDNKVLTRSDKNRGKSDNVPSEEVVKKMKNYWRQLLNAKLITQRKFDNLTKAERGGLSELDKAGFIKRQLVETRQITKHVAQILDSRMNTKYDENDKLIREVKVITLKSKLVSDFRKDFQFYKVREINNYHHAHDAYLNAVVGTALIKKYPKLESEFVYGDYKVYDVRKMIAKSEQEIGKATAKYFFYSNIMNFFKTEITLANGEIRKRPLIETNGETGEIVWDKGRDFATVRKVLSMPQVNIVKKTEVQTGGFSKESILPKRNSDKLIARKKDWDPKKYGGFVSPTVAYSVLVVAKVEKGKSKKLKSVKELLGITIMERSSFEKNPIDFLEAKGYKEVKKDLIIKLPKYSLFELENGRKRMLASARELQKGNELALPSKYVNFLYLASHYEKLKGSPEDNEQKQLFVEQHKHYLDEIIEQISEFSKRVILADANLDKVLSAYNKHRDKPIREQAENIIHLFTLTNLGAPAAFKYFDTTIDRKQYRSTKEVLDATLIHQSITGLYETRIDLSQLGGDEGADKRTADGSEFESPKKKRKV

SEQ ID NO: 1450-2999 - skipped (1550 entries)

SEQ ID NO: 3000 - RNA, 80 nt, synthetic construct; identical to SEQ ID NO: 224
  misc_feature 1..80: note = Description of Artificial Sequence: Synthetic oligonucleotide
  source 1..80: mol_type = other RNA

SEQ ID NO: 3001-4000 - skipped (1000 entries)

SEQ ID NO: 4001 - DNA, 1350 bp, Rabies lyssavirus
  source 1..1350: mol_type = other DNA
atggatgccgacaagattgtattcaaagtcaataatcaggtggtctctttgaagcctgagattatcgtggatcaatatgagtacaagtaccctgccatcaaagatttgaaaaagccctgtataaccctaggaaaggctcccgatttaaataaagcatacaagtcagttttgtcaggcatgagcgccgccaaacttaatcctgacgatgtatgttcctatttggcagcggcaatgcagttttttgaggggacatgtccggaagactggaccagctatggaattgtgattgcacgaaaaggagataagatcaccccaggttctctggtggagataaaacgtactgatgtagaagggaattgggctctgacaggaggcatggaactgacaagagaccccactgtccctgagcatgcgtccttagtcggtcttctcttgagtctgtataggttgagcaaaatatccgggcaaaacactggtaactataagacaaacattgcagacaggatagagcagatttttgagacagccccttttgttaaaatcgtggaacaccatactctaatgacaactcacaaaatgtgtgctaattggagtactataccaaacttcagatttttggccggaacctatgacatgtttttctcccggattgagcatctatattcagcaatcagagtgggcacagttgtcactgcttatgaagactgttcaggactggtatcatttactgggttcataaaacaaatcaatctcaccgctagagaggcaatactatatttcttccacaagaactttgaggaagagataagaagaatgtttgagccagggcaggagacagctgttcctcactcttatttcatccacttccgttcactaggcttgagtgggaaatctccttattcatcaaatgctgttggtcacgtgttcaatctcattcactttgtaggatgctatatgggtcaagtcagatccctaaatgcaacggttattgctgcatgtgctcctcatgaaatgtctgttctagggggctatctgggagaggaattcttcgggaaagggacatttgaaagaagattcttcagagatgagaaagaacttcaagaatacgaggcggctgaactgacaaagactgacgtagcactggcagatgatggaactgtcaactctgacgacgaggactacttttcaggtgaaaccagaagtccggaggctgtttatactcgaatcatgatgaatggaggtcgactaaagagatctcacatacggagatatgtctcagtcagttccaatcatcaagcccgtccaaactcattcgccgagtttctaaacaagacatattcgagtgactca

SEQ ID NO: 4002 - protein, 450 aa, Rabies lyssavirus
MDADKIVFKVNNQVVSLKPEIIVDQYEYKYPAIKDLKKPCITLGKAPDLNKAYKSVLSGMSAAKLNPDDVCSYLAAAMQFFEGTCPEDWTSYGIVIARKGDKITPGSLVEIKRTDVEGNWALTGGMELTRDPTVPEHASLVGLLLSLYRLSKISGQNTGNYKTNIADRIEQIFETAPFVKIVEHHTLMTTHKMCANWSTIPNFRFLAGTYDMFFSRIEHLYSAIRVGTVVTAYEDCSGLVSFTGFIKQINLTAREAILYFFHKNFEEEIRRMFEPGQETAVPHSYFIHFRSLGLSGKSPYSSNAVGHVFNLIHFVGCYMGQVRSLNATVIAACAPHEMSVLGGYLGEEFFGKGTFERRFFRDEKELQEYEAAELTKTDVALADDGTVNSDDEDYFSGETRSPEAVYTRIMMNGGRLKRSHIRRYVSVSSNHQARPNSFAEFLNKTYSSDS

SEQ ID NO: 4003 - DNA, 6378 bp, Rabies lyssavirus
  source 1..6378: mol_type = other DNA
ctcgatcctggagaggtctatgatgaccctattgacccaatcgagttagaggctgaacccagaggaacccccattgtccccaacatcttgaggaactctgactacaatctcaactctcctttgatagaagatcctgctagactaatgttagaatggttaaaaacagggaatagaccttatcggatgactctaacagacaattgctccaggtctttcagagttttgaaagattatttcaagaaggtagatttgggttctctcaaggtgggcggaatggctgcacagtcaatgatttctctctggttatatggtgcccactctgaatccaacaggagccggagatgtataacagacttggcccatttctattccaagtcgtcccccatagagaagctgttgaatctcacgctaggaaatagagggctgagaatccccccagagggagtgttaagttgccttgagagggttgattatgataatgcatttggaaggtatcttgccaacacgtattcctcttacttgttcttccatgtaatcaccttatacatgaacgccctagactgggatgaagaaaagaccatcctagcattatggaaagatttaacctcagtggacatcgggaaggacttggtaaagttcaaagaccaaatatggggactgctgatcgtgacaaaggactttgtttactcccaaagttccaattgtctttttgacagaaactacacacttatgctaaaagatcttttcttgtctcgcttcaactccttaatggtcttgctctctcccccagagccccgatactcagatgacttgatatctcaactatgccagctgtacattgctggggatcaagtcttgtctatgtgtggaaactccggctatgaagtcatcaaaatattggagccatatgtcgtgaatagtttagtccagagagcagaaaagtttaggcctctcattcattccttgggagactttcctgtatttataaaagacaaggtaagtcaacttgaagagacgttcggtccctgtgcaagaaggttctttagggctctggatcaattcgacaacatacatgacttggtttttgtgtttggctgttacaggcattgggggcacccatatatagattatcgaaagggtctgtcaaaactatatgatcaggttcaccttaaaaaaatgatagataagtcctaccaggagtgcttagcaagcgacctagccaggaggatccttagatggggttttgataagtactccaagtggtatctggattcaagattcctagcccgagaccaccccttgactccttatatcaaaacccaaacatggccacccaaacatattgtagacttggtgggggatacatggcacaagctcccgatcacgcagatctttgagattcctgaatcaatggatccgtcagaaatattggatgacaaatcacattctttcaccagaacgagactagcttcttggctgtcagaaaaccgaggggggcctgttcctagcgaaaaagttattatcacggccctgtctaagccgcctgtcaatccccgagagtttctgaggtctatagacctcggaggattgccagatgaagacttgataattggcctcaagccaaaggaacgggaattgaagattgaaggtcgattctttgctctaatgtcatggaatctaagattgtattttgtcatcactgaaaaactcttggccaactacatcttgccactttttgacgcgctgactatgacagacaacctgaacaaggtgtttaaaaagctgatcgacagggtcaccgggcaagggcttttggactattcaagggtcacatatgcatttcacctggactatgaaaagtggaacaaccatcaaagattagagtcaacagaggatgtattttctgtcctagatcaagtgtttggattgaagagagtgttttctagaacacacgagttttttcaaaaggcctggatctattattcagacagatcagacctcatcgggttacgggaggatcaaatatactgcttagatgcgtccaacggcccaacctgttggaatggccaggatggcgggctagaaggcttacggcagaagggctggagtctagtcagcttattgatgatagatagagaatctcaaatcaggaacacaagaaccaaaatactagctcaaggagacaaccaggttttatgtccgacatacatgttgtcgccagggctatctcaagaggggctcctctatgaattggagagaatatcaaggaatgcactttcgatatacagagccgtcgaggaaggggcatctaagctagggctgatcatcaagaaagaagagaccatgtgtagttatgacttcctcatctatggaaaaacccctttgtttagaggtaacatattggtgcctgagtccaaaagatgggccagagtctcttgcgtctctaatgaccaaatagtcaacctcgccaatataatgtcgacagtgtccaccaatgcgctaacagtggcacaacactctcaatctttgatcaaaccgatgagggattttctgctcatgtcagtacaggcagtctttcactacctgctatttagcccaatcttaaagggaagagtttacaagattctgagcgctgaaggggagagctttctcctagccatgtcaaggataatctatctagatccttctttgggagggatatctggaatgtccctcggaagattccatatacgacagttctcagaccctgtctctgaagggttatccttctggagagagatctggttaagctcccaagagtcctggattcacgcgttgtgtcaagaggctggaaacccagatcttggagagagaacactcgagagcttcactcgccttctagaagatccgaccaccttaaatatcagaggaggggccagtcctaccattctactcaaggatgcaatcagaaaggctttatatgacgaggtggacaaggtggaaaattcagagtttcgagaggcaatcctgttgtccaagacccatagagataattttatactcttcttaatatctgttgagcctctgtttcctcgatttctcagtgagctattcagttcgtcttttttgggaatccccgagtcaatcattggattgatacaaaactcccgaacgataagaaggcagtttagaaagagtctctcaaaaactttagaagaatccttctacaactcagagatccacgggattagtcggatgacccagacacctcagagggttgggggggtgtggccttgctcttcagagagggcagatctacttagggagatctcttggggaagaaaagtggtaggcacgacagttcctcacccttctgagatgttgggattacttcccaagtcctctatttcttgcacttgtggagcaacaggaggaggcaatcctagagtttctgtatcagtactcccgtcctttgatcagtcatttttttcacgaggccccctaaagggatacttgggctcgtccacctctatgtcgacccagctattccatgcatgggaaaaagtcactaatgttcatgtggtgaagagagctctatcgttaaaagaatctataaactggttcattactagagattccaacttggctcaagctctaattaggaacattatgtctctgacaggccctgatttccctctagaggaggcccctgtcttcaaaaggacggggtcagccttgcataggttcaagtctgccagatacagcgaaggagggtattcttctgtctgcccgaacctcctctctcatatttctgttagtacagacaccatgtctgatttgacccaagacgggaagaactacgatttcatgttccagccattgatgctttatgcacagacatggacatcagagctggtacagagagacacaaggctaagagactctacgtttcattggcacctccgatgcaacaggtgtgtgagacccattgacgacgtgaccctggagacctctcagatcttcgagtttccggatgtgtcgaaaagaatatccagaatggtttctggggctgtgcctcacttccagaggcttcccgatatccgtctgagaccaggagattttgaatctctaagcggtagagaaaagtctcaccatatcggatcagctcaggggctcttatactcaatcttagtggcaattcacgactcaggatacaatgatggaaccatcttccctgtcaacatatacggcaaggtttcccctagagactatttgagagggctcgcaaggggagtattgataggatcctcgatttgcttcttgacaagaatgacaaatatcaatattaatagacctcttgaattggtctcaggggtaatctcatatattctcctgaggctagataaccatccctccttgtacataatgctcagagaaccgtctcttagaggagagatattttctatccctcagaaaatccccgccgcttatccaaccactatgaaagaaggcaacagatcaatcttgtgttatctccaacatgtgctacgctatgagcgagagataatcacggcgtctccagagaatgactggctatggatcttttcagactttagaagtgccaaaatgacgtacctatccctcattacttaccagtctcatcttctactccagagggttgagagaaacctatctaagagtatgagagataacctgcgacaattgagttctttgatgaggcaggtgctgggcgggcacggagaagataccttagagtcagacgacaacattcaacgactgctaaaagactctttacgaaggacaagatgggtggatcaagaggtgcgccatgcagctagaaccatgactggagattacagccccaacaagaaggtgtcccgtaaggtaggatgttcagaatgggtctgctctgctcaacaggttgcagtctctacctcagcaaacccggcccctgtctcggagcttgacataagggccctctctaagaggttccagaaccctttgatctcgggcttgagagtggttcagtgggcaaccggtgctcattataagcttaagcctattctagatgatctcaatgttttcccatctctctgccttgtagttggggacgggtcaggggggatatcaagggcagtcctcaacatgtttccagatgccaagcttgtgttcaacagtcttttagaggtgaatgacctgatggcttccggaacacatccactgcctccttcagcaatcatgaggggaggaaatgatatcgtctccagagtgatagatcttgactcaatctgggaaaaaccgtccgacttgagaaacttggcaacctggaaatacttccagtcagtccaaaagcaggtcaacatgtcctatgacctcattatttgcgatgcagaagttactgacattgcatctatcaaccggatcaccctgttaatgtccgattttgcattgtctatagatggaccactctatttggtcttcaaaacttatgggactatgctagtaaatccaaactacaaggctattcaacacctgtcaagagcgttcccctcggtcacagggtttatcacccaagtaacttcgtctttttcatctgagctctacctccgattctccaaacgagggaagtttttcagagatgctgagtacttgacctcttccacccttcgagaaatgagccttgtgttattcaattgtagcagccccaagagtgagatgcagagagctcgttccttgaactatcaggatcttgtgagaggatttcctgaagaaatcatatcaaatccttacaatgagatgatcataactctgattgacagtgatgtagaatcttttctagtccacaagatggttgatgatcttgagttacagaggggaactctgtctaaagtggctatcattatagccatcatgatagttttctccaacagagtcttcaacgtttccaaacccctaactgacccctcgttctatccaccgtctgatcccaaaatcctgaggcacttcaacatatgttgcagtactatgatgtatctatctactgctttaggtgacgtccctagcttcgcaagacttcacgacctgtataacagacctataacttattacttcagaaagcaagtcattcgagggaacgtttatctatcttggagttggtccaacgacacctcagtgttcaaaagggtagcctgtaattctagcctgagtctgtcatctcactggatcaggttgatttacaagatagtgaagactaccagactcgttggcagcatcaaggatctatccagagaagtggaaagacaccttcataggtacaacaggtggatcaccctagaggatatcagatctagatcatccctactagactacagttgcctg

SEQ ID NO: 4004 - protein, 2126 aa, Rabies lyssavirus
LDPGEVYDDPIDPIELEAEPRGTPIVPNILRNSDYNLNSPLIEDPARLMLEWLKTGNRPYRMTLTDNCSRSFRVLKDYFKKVDLGSLKVGGMAAQSMISLWLYGAHSESNRSRRCITDLAHFYSKSSPIEKLLNLTLGNRGLRIPPEGVLSCLERVDYDNAFGRYLANTYSSYLFFHVITLYMNALDWDEEKTILALWKDLTSVDIGKDLVKFKDQIWGLLIVTKDFVYSQSSNCLFDRNYTLMLKDLFLSRFNSLMVLLSPPEPRYSDDLISQLCQLYIAGDQVLSMCGNSGYEVIKILEPYVVNSLVQRAEKFRPLIHSLGDFPVFIKDKVSQLEETFGPCARRFFRALDQFDNIHDLVFVFGCYRHWGHPYIDYRKGLSKLYDQVHLKKMIDKSYQECLASDLARRILRWGFDKYSKWYLDSRFLARDHPLTPYIKTQTWPPKHIVDLVGDTWHKLPITQIFEIPESMDPSEILDDKSHSFTRTRLASWLSENRGGPVPSEKVIITALSKPPVNPREFLRSIDLGGLPDEDLIIGLKPKERELKIEGRFFALMSWNLRLYFVITEKLLANYILPLFDALTMTDNLNKVFKKLIDRVTGQGLLDYSRVTYAFHLDYEKWNNHQRLESTEDVFSVLDQVFGLKRVFSRTHEFFQKAWIYYSDRSDLIGLREDQIYCLDASNGPTCWNGQDGGLEGLRQKGWSLVSLLMIDRESQIRNTRTKILAQGDNQVLCPTYMLSPGLSQEGLLYELERISRNALSIYRAVEEGASKLGLIIKKEETMCSYDFLIYGKTPLFRGNILVPESKRWARVSCVSNDQIVNLANIMSTVSTNALTVAQHSQSLIKPMRDFLLMSVQAVFHYLLFSPILKGRVYKILSAEGESFLLAMSRIIYLDPSLGGISGMSLGRFHIRQFSDPVSEGLSFWREIWLSSQESWIHALCQEAGNPDLGERTLESFTRLLEDPTTLNIRGGASPTILLKDAIRKALYDEVDKVENSEFREAILLSKTHRDNFILFLISVEPLFPRFLSELFSSSFLGIPESIIGLIQNSRTIRRQFRKSLSKTLEESFYNSEIHGISRMTQTPQRVGGVWPCSSERADLLREISWGRKVVGTTVPHPSEMLGLLPKSSISCTCGATGGGNPRVSVSVLPSFDQSFFSRGPLKGYLGSSTSMSTQLFHAWEKVTNVHVVKRALSLKESINWFITRDSNLAQALIRNIMSLTGPDFPLEEAPVFKRTGSALHRFKSARYSEGGYSSVCPNLLSHISVSTDTMSDLTQDGKNYDFMFQPLMLYAQTWTSELVQRDTRLRDSTFHWHLRCNRCVRPIDDVTLETSQIFEFPDVSKRISRMVSGAVPHFQRLPDIRLRPGDFESLSGREKSHHIGSAQGLLYSILVAIHDSGYNDGTIFPVNIYGKVSPRDYLRGLARGVLIGSSICFLTRMTNININRPLELVSGVISYILLRLDNHPSLYIMLREPSLRGEIFSIPQKIPAAYPTTMKEGNRSILCYLQHVLRYEREIITASPENDWLWIFSDFRSAKMTYLSLITYQSHLLLQRVERNLSKSMRDNLRQLSSLMRQVLGGHGEDTLESDDNIQRLLKDSLRRTRWVDQEVRHAARTMTGDYSPNKKVSRKVGCSEWVCSAQQVAVSTSANPAPVSELDIRALSKRFQNPLISGLRVVQWATGAHYKLKPILDDLNVFPSLCLVVGDGSGGISRAVLNMFPDAKLVFNSLLEVNDLMASGTHPLPPSAIMRGGNDIVSRVIDLDSIWEKPSDLRNLATWKYFQSVQKQVNMSYDLIICDAEVTDIASINRITLLMSDFALSIDGPLYLVFKTYGTMLVNPNYKAIQHLSRAFPSVTGFITQVTSSFSSELYLRFSKRGKFFRDAEYLTSSTLREMSLVLFNCSSPKSEMQRARSLNYQDLVRGFPEEIISNPYNEMIITLIDSDVESFLVHKMVDDLELQRGTLSKVAIIIAIMIVFSNRVFNVSKPLTDPSFYPPSDPKILRHFNICCSTMMYLSTALGDVPSFARLHDLYNRPITYYFRKQVIRGNVYLSWSWSNDTSVFKRVACNSSLSLSSHWIRLIYKIVKTTRLVGSIKDLSREVERHLHRYNRWITLEDIRSRSSLLDYSCL

SEQ ID NO: 4005 - DNA, 603 bp, Rabies lyssavirus
  source 1..603: mol_type = other DNA
ttctagaagcagagaggaatctttgtcctcttcggacctttgtgtctgaagagacatgtcagaccatagttgacatgctctcgggttcatgttgatacaccagactctgccctggatatgacactgttttgcaatcactcttatttgcaatccgacgaactcagtatcatcatcccaagtgatctcctgagagtattccaactcctccccttcaagagggcccctggaatcagcccactggaagataaaggttctcctcaatttgtatacccagttcaggccctcagggactggagatcctgacaaagccagtccaataaccactttgactaacccgatcatcctatgattcccagaatatatctcgtcgaatgatttcagaatgtgccgcaggatcctgaacgagtaaccattcgggctacacactttaacccttccgttgatacaaaagttcctcatgttcttcttgcctgtaagttctttcagcgggacgtattcagggggtggaagccacaagtcatcgtcatccagaggggctgacgcgggagaggatttttgagtgtcctcgtccctgcggtttttcactatcttacgtaggaggtt

SEQ ID NO: 4006 - protein, 201 aa, Rabies lyssavirus
NLLRKIVKNRRDEDTQKSSPASAPLDDDDLWLPPPEYVPLKELTGKKNMRNFCINGRVKVCSPNGYSFRILRHILKSFDEIYSGNHRMIGLVKVVIGLALSGSPVPEGLNWVYKLRRTFIFQWADSRGPLEGEELEYSQEITWDDDTEFVGLQIRVIAKQCHIQGRVWCINMNPRACQLWSDMSLQTQRSEEDKDSSLLLE

SEQ ID NO: 4007 - DNA, 888 bp, Rabies lyssavirus
  source 1..888: mol_type = other DNA
agcaagatctttgtcaatcctagtgctattagagccggtctggccgatcttgagatggctgaagaaactgttgatctgatcaatagaaatatcgaagacaatcaggctcatctccaaggggaacccatagaggtggacaatctccctgaggatatggggcgacttcacctggatgatggaaaatcgcccaaccatggtgagatagccaaggtgggagaaggcaagtatcgagaggactttcagatggatgaaggagaggatcctagcttcctgttccagtcatacctggaaaatgttggagtccaaatagtcagacaaatgaggtcaggagagagatttctcaagatatggtcacagaccgtagaagagattatatcctatgtcgcggtcaactttcccaaccctccaggaaagtcttcagaggataaatcaacccagactactggccgagagctcaagaaggagacaacacccactccttctcagagagaaagccaatcatcgaaagccaggatggcggctcaaattgcttctggccctccagcccttgaatggtcggctaccaatgaagaggatgatctatcagtggaggctgagatcgctcaccagattgcagaaagtttctccaaaaaatataagtttccctctcgatcctcagggatactcttgtataattttgagcaattgaaaatgaaccttgatgatatagttaaagaggcaaaaaatgtaccaggtgtgacccgtttagcccatgacgggtccaaactccccctaagatgtgtactgggatgggtcgctttggccaactctaagaaattccagttgttagtcgaatccgacaagctgagtaaaatcatgcaagatgacttgaatcgctatacatcttgc

SEQ ID NO: 4008 - protein, 296 aa, Rabies lyssavirus
SKIFVNPSAIRAGLADLEMAEETVDLINRNIEDNQAHLQGEPIEVDNLPEDMGRLHLDDGKSPNHGEIAKVGEGKYREDFQMDEGEDPSFLFQSYLENVGVQIVRQMRSGERFLKIWSQTVEEIISYVAVNFPNPPGKSSEDKSTQTTGRELKKETTPTPSQRESQSSKARMAAQIASGPPALEWSATNEEDDLSVEAEIAHQIAESFSKKYKFPSRSSGILLYNFEQLKMNLDDIVKEAKNVPGVTRLAHDGSKLPLRCVLGWVALANSKKFQLLVESDKLSKIMQDDLNRYTSC

SEQ ID NO: 4009 - DNA, 1572 bp, Rabies lyssavirus
  source 1..1572: mol_type = other DNA
atggttcctcaggctctcctgtttgtaccccttctggtttttccattgtgttttgggaaattccctatttacacgataccagacaagcttggtccctggagtccgattgacatacatcacctcagctgcccaaacaatttggtagtggaggacgaaggatgcaccaacctgtcagggttctcctacatggaacttaaagttggatacatcttagccataaaagtgaacgggttcacttgcacaggcgttgtgacggaggctgaaacctacactaacttcgttggttatgtcacaaccacgttcaaaagaaagcatttccgcccaacaccagatgcatgtagagccgcgtacaactggaagatggccggtgaccccagatatgaagagtctctacacaatccgtaccctgactaccgctggcttcgaactgtaaaaaccaccaaggagtctctcgttatcatatctccaagtgtggcagatttggacccatatgacagatcccttcactcgagggtcttccctagcgggaagtgctcaggagtagcggtgtcttctacctactgctccactaaccacgattacaccatttggatgcccgagaatccgagactagggatgtcttgtgacatttttaccaatagtagagggaagagagcatccaaagggagtgagacttgcggctttgtagatgaaagaggcctatataagtctttaaaaggagcatgcaaactcaagttatgtggagttctaggacttagacttatggatggaacatgggtctcgatgcaaacatcaaatgaaaccaaatggtgccctcccgataagttggtgaacctgcacgactttcgctcagacgaaattgagcaccttgttgtagaggagttggtcaggaagagagaggagtgtctggatgcactagagtccatcatgacaaccaagtcagtgagtttcagacgtctcagtcatttaagaaaacttgtccctgggtttggaaaagcatataccatattcaacaagaccttgatggaagccgatgctcactacaagtcagtcagaacttggaatgagatcctcccttcaaaagggtgtttaagagttggggggaggtgtcatcctcatgtgaacggggtgtttttcaatggtataatattaggacctgacggcaatgtcttaatcccagagatgcaatcatccctcctccagcaacatatggagttgttggaatcctcggttatcccccttgtgcaccccctggcagacccgtctaccgttttcaaggacggtgacgaggctgaggattttgttgaagttcaccttcccgatgtgcacaatcaggtctcaggagttgacttgggtctcccgaactgggggaagtatgtattactgagtgcaggggccctgactgccttgatgttgataattttcctgatgacatgttgtagaagagtcaatcgatcagaacctacgcaacacaatctcagagggacagggagggaggtgtcagtcactccccaaagcgggaagatcatatcttcatgggaatcacacaagagtgggggtgagaccagactg

SEQ ID NO: 4010 - protein, 524 aa, Rabies lyssavirus
MVPQALLFVPLLVFPLCFGKFPIYTIPDKLGPWSPIDIHHLSCPNNLVVEDEGCTNLSGFSYMELKVGYILAIKVNGFTCTGVVTEAETYTNFVGYVTTTFKRKHFRPTPDACRAAYNWKMAGDPRYEESLHNPYPDYRWLRTVKTTKESLVIISPSVADLDPYDRSLHSRVFPSGKCSGVAVSSTYCSTNHDYTIWMPENPRLGMSCDIFTNSRGKRASKGSETCGFVDERGLYKSLKGACKLKLCGVLGLRLMDGTWVSMQTSNETKWCPPDKLVNLHDFRSDEIEHLVVEELVRKREECLDALESIMTTKSVSFRRLSHLRKLVPGFGKAYTIFNKTLMEADAHYKSVRTWNEILPSKGCLRVGGRCHPHVNGVFFNGIILGPDGNVLIPEMQSSLLQQHMELLESSVIPLVHPLADPSTVFKDGDEAEDFVEVHLPDVHNQVSGVDLGLPNWGKYVLLSAGALTALMLIIFLMTCCRRVNRSEPTQHNLRGTGREVSVTPQSGKIISSWESHKSGGETRL

SEQ ID NO: 4011 - DNA, 72 bp, synthetic construct
  source 1..72: mol_type = other DNA
ggctcgttggtctaggggtatgattctcgcttagggtgcgagaggtcccgggttcaaatcccggacgagccc

SEQ ID NO: 4012 - DNA, 73 bp, synthetic construct
  source 1..73: mol_type = other DNA
ggctccatagctcaggggttagagcactggtcttgtaaaccaggggtcgcgagttcaattctcgctggggctt

SEQ ID NO: 4013 - DNA, 72 bp, synthetic construct
  source 1..72: mol_type = other DNA
gcgttggtggtatagtggtgagcatagctgccttccaagcagttgacccgggttcgattcccggccaacgca

SEQ ID NO: 4014 - DNA, 71 bp, synthetic construct
  source 1..71: mol_type = other DNA
gcatgggtggttcagtggtagaattctcgcctgccacgcgggaggcccgggttcgattcccggcccatgca

SEQ ID NO: 4015 - DNA, 83 bp, synthetic construct
  source 1..83: mol_type = other DNA
gtcaggatggccgagcggtctaaggcgctgcgttcaggtcgcagtctcccctagaggcgtgggttcgaatcccactcctgaca

SEQ ID NO: 4016 - DNA, 94 bp, synthetic construct
  source 1..94: mol_type = other DNA
gctccagtggcgcaatcggttagcgcgcggtacttataagacagtgcacctgtgagcaatgccgaggttgtgagttcaagcctcacctggagca

SEQ ID NO: 4017 - DNA, 72 bp, synthetic construct
  source 1..72: mol_type = other DNA
gaaaaagtcatggaggccatggggttggcttgaaaccagctttggggggttcgattccttccttttttgtct

SEQ ID NO: 4018 - DNA, 78 bp, synthetic construct
  source 1..78: mol_type = other DNA
gggccagtggcgcaatggataacgcgtctgactacggatcagaagattccaggttcgactcctggctggctcggtgta

SEQ ID NO: 4019 - DNA, 77 bp, synthetic construct
  source 1..77: mol_type = other DNA
aaacaagcgcaagtggtttagtggtaaaatccaacgttgccatcgttgggcccccggttcgattccgggcttgcgca

SEQ ID NO: 4020 - DNA, 77 bp, synthetic construct
  source 1..77: mol_type = other DNA
aacaaagcaccagtggtctagtggtagaatagtaccctgccacggtacagacccgggttcgattcccggctggtgca

SEQ ID NO: 4021 - DNA, 72 bp, synthetic construct
  source 1..72: mol_type = other DNA
tcctcgttagtatagtggtgagtatccccgcctgtcacgcgggagaccggggttcgattccccgacggggag

SEQ ID NO: 4022 - DNA, 75 bp, synthetic construct
  source 1..75: mol_type = other DNA
aaaagcaaaagatgctggtggttggcactcctggtttccaggacggggttcaaatccctgcggcgtctttgcttt

SEQ ID NO: 4023 - DNA, 58 bp, synthetic construct
  source 1..58: mol_type = other DNA
aaagacgctggtggttggtgtttccaggacggggttcaagtccctgcggcgtcctcgc

SEQ ID NO: 4024 - DNA, 52 bp, synthetic construct
  source 1..52: mol_type = other DNA
ggctctggtggcttccaggacggggttcaagtccctgcagtgcccttgctga

SEQ ID NO: 4025 - DNA, 60 bp, synthetic construct
  source 1..60: mol_type = other DNA
aaaggcgctggtggtggcactcccagcgggacggggttcgaatccccgcggcgcctctgc

SEQ ID NO: 4026 - DNA, 155 bp, synthetic construct
  source 1..155: mol_type = other DNA
gaaggtttttcttttcctgagaaaacaacacgtattgttttctcaggttttgctttttggcctttttctagcttaaaaaaaaaagcaaaagatgctggtggttggcactcctggtttccaggacggggttcaaatccctgcggcgtctttgcttt

SEQ ID NO: 4027 - DNA, 158 bp, synthetic construct
  source 1..158: mol_type = other DNA
gcaggtgtttcttttactgagtgcagcccatggccgcactcaggttttgcttttcaccttcccatctgtgaaagagtgagcaggaaaaagcaaaaggcgctggtggtggcacgtccagcacggctgggccggggttcgagtccccgcagtgttgctgc

SEQ ID NO: 4028 - DNA, 155 bp, synthetic construct
  source 1..155: mol_type = other DNA
gaaggtttttcttttcctgagaaaacaacacgttttgttttctcaggttttgctttttggcctttttctagcttaaaaaaaaaagcaaaagatgctggtggttggcactcctggtttccaggacagggttcaaatccctgcggcgtctttgcttt

SEQ ID NO: 4029 - DNA, 74 bp, synthetic construct
  source 1..74: mol_type = other DNA
aaagcaaaagatgctggtggttggcactcctggtttccaggacagggttcaaatccctgcggcgtctttgcttt

SEQ ID NO: 4030 - DNA, 158 bp, synthetic construct; identical to SEQ ID NO: 4027
  source 1..158: mol_type = other DNA

SEQ ID NO: 4031 - DNA, 151 bp, synthetic construct
  source 1..151: mol_type = other DNA
aaaggtttttcttttcctgagaaaacaaccttttgttttctcaggttttgctttttggcctttccctagctttaaaaaaaaaagcaaaagacgctggtggctggcactcctggtttccaggacggggttcaagtccctgcggtgtctttgc

SEQ ID NO: 4032 - DNA, 76 bp, synthetic construct
  source 1..76: mol_type = other DNA
aaagcaaaagacgctggtggctggcactcctggtttccaggacggggttcaagtccctgcggtgtctttgcttgac

SEQ ID NO: 4033 - DNA, 157 bp, synthetic construct
  source 1..157: mol_type = other DNA
gcaggtgtttcttttcctgaccgcggctcatggccgcgctcaggttttgcttttcacctttgtctgagagaacgaacgtgagcaggaaaaagcaaaaggcactggtggcggcacgcccgcacctcgggccagggttcgagtccctgcagtaccgtgc

SEQ ID NO: 4034 - DNA, 71 bp, synthetic construct
  source 1..71: mol_type = other DNA
ggctcgttggcctaggggtatggctcccgcttagggtgcgggaggtcccgggttcaaatcccggacgagcc

SEQ ID NO: 4035 - DNA, 58 bp, synthetic construct
  source 1..58: mol_type = other DNA
ggctcgttggcctaggggtatggctgaaaaggtcccgggttcaaatcccggacgagcc

SEQ ID NO: 4036 - DNA, 45 bp, synthetic construct
  source 1..45: mol_type = other DNA
ggctcgttgaaagaaaaggtcccgggttcaaatcccggacgagcc

SEQ ID NO: 4037 - DNA, 73 bp, synthetic construct
  source 1..73: mol_type = other DNA
ggctccatagcgcaggggttagcgcaccggtcttgtaaaccgggggtcgcgagttcaattctcgctggggctt

SEQ ID NO: 4038 - DNA, 60 bp, synthetic construct
  source 1..60: mol_type = other DNA
ggctccatagcgcaggggttagcgcagaaagggtcgcgagttcaattctcgctggggctt

SEQ ID NO: 4039 - DNA, 51 bp, synthetic construct
  source 1..51: mol_type = other DNA
ggctccatagaaagaaagaaagggtcgcgagttcaattctcgctggggctt

SEQ ID NO: 4040 - DNA, 74 bp, synthetic construct
  source 1..74: mol_type = other DNA
gccagagtagctcaattggtagagcaacaggtcaccgatcctggtggttctcggttcaagtccgagctctggtc

SEQ ID NO: 4041 - DNA, 75 bp, synthetic construct
  source 1..75: mol_type = other DNA
gccagggtagctcaatcggtagagcagcggttcctggagtccgctggttctcggttcaagcccgagccctggttg

SEQ ID NO: 4042 - DNA, 75 bp, synthetic construct
  source 1..75: mol_type = other DNA
gtcggggtagctcaaatggtagagtggcaggccaacatagccagcagatctcggttcaaacccgagccctgacca

SEQ ID NO: 4043 - DNA, 74 bp, synthetic construct
  source 1..74: mol_type = other DNA
gtcggggtagctcaattggtagagcggcaggctcatcccctgcaggttctcggttcaatcccgggtcccgacgc

SEQ ID NO: 4044 - DNA, 73 bp, synthetic construct
  source 1..73: mol_type = other DNA
gccagggtagctcaattggtagagcatcaggctagtatcctgtcggttccggttcaagtccgggccctggtta

SEQ ID NO: 4045 - DNA, 74 bp, synthetic construct
  source 1..74: mol_type = other DNA
gccagcgtagctcaattgttagagcagcggccaccaagcctgcaggttctcggttcaagtccgggcgctggcat

SEQ ID NO: 4046 - DNA, 85 bp, synthetic construct
  source 1..85: mol_type = other DNA
gccagggtagctcaattggtagagcggcagacaccacctacgtggtctagtctgtggatctcggttcaagtccgagtcctggcca

SEQ ID NO: 4047 - DNA, 85 bp, synthetic construct; identical to SEQ ID NO: 4046
  source 1..85: mol_type = other DNA

SEQ ID NO: 4048 - DNA, 75 bp, synthetic construct
  source 1..75: mol_type = other DNA
accagagtggctcacctggtagagcaccaggctgcccatcctgttggttctcggttcaaatccgagctctggtga

SEQ ID NO: 4049 - DNA, 42 bp, synthetic construct
  source 1..42: mol_type = other DNA
gatctgaatggagagagggggttcaaatccccctctctccgc

SEQ ID NO: 4050 - DNA, 40 bp, synthetic construct
  source 1..40: mol_type = other DNA
gggccagccaggttcgactcctggctggctcggtgtattt

SEQ ID NO: 4051 - DNA, 40 bp, synthetic construct
  source 1..40: mol_type = other DNA
ggtggggccagctcctgaaggttcgaatccttcccccacc

SEQ ID NO: 4052 - RNA, 20 nt, synthetic construct
  source 1..20: mol_type = other RNA
taaataggctgtaccagtgc

SEQ ID NO: 4053 - RNA, 20 nt, synthetic construct
  source 1..20: mol_type = other RNA
caggatccgcacagactcca

SEQ ID NO: 4054 - DNA, 20 bp, synthetic construct
  source 1..20: mol_type = other DNA
gaacacaaagcatagactgc

1. A recombinant negative-strand RNA virus genome, comprising
a nucleic acid encoding a first guide RNA (gRNA) that comprises a 5′ end and a 3′ end; and
a nucleic acid encoding a first transfer RNA (tRNA) positioned at one or both of the 3′ end of the nucleic acid encoding the first gRNA or the 5′ end of the nucleic acid encoding the first gRNA.

2. The recombinant negative-strand RNA virus genome of claim 1, comprising a nucleic acid encoding a second tRNA, wherein:
the nucleic acid encoding the first tRNA is positioned at the 3′ end of the nucleic acid encoding the first gRNA; and the nucleic acid encoding the second tRNA is positioned at the 5′ end of the nucleic acid encoding the first gRNA;
the nucleotide sequence of the first tRNA and the nucleotide sequence of the second tRNA are at least 90%, 91%, 92%, 93%, 94%, 95%, 96%, 97%, 98%, 99%, or 100% identical; and/or
the first tRNA and the second tRNA specify the same or different amino acid(s).

3-6. (canceled)

7. The recombinant negative-strand RNA virus genome of claim 1, comprising two or three nucleic acids encoding the first tRNA, optionally wherein:
the recombinant negative-strand RNA virus genome comprises a nucleic acid encoding a second gRNA wherein;
the two or more nucleic acids encode identical gRNA;
the two or more nucleic acids encode at least one different gRNA;
the nucleotide sequence of the first gRNA and the nucleotide sequence of the second gRNA are at least 90%, 91%, 92%, 93%, 94%, 95%, 96%, 97%, 98%, 99%, or 100% identical;
the first gRNA and the second gRNA specifically hybridize to the same target nucleic acid sequence or specifically hybridize to different target nucleic acid sequence.

8-14. (canceled)

15. The recombinant negative-strand RNA virus genome of claim 7, wherein the first tRNA and/or the second tRNA is each selected from the group consisting of: tRNA-ala, tRNA-arg, tRNA-asn, tRNA-asp, tRNA-cys, tRNA-gln, tRNA-gly, tRNA-his, tRNA-ile, tRNA-leu, tRNA-lys, tRNA-met, tRNA-phe, tRNA-pro, tRNA-pyl, tRNA-sec, tRNA-ser, tRNA-thr, tRNA-trp, tRNA-tyr, and tRNA-val.

16. (canceled)

17. The recombinant negative-strand RNA virus genome of claim 15, wherein the first tRNA and/or the second tRNA comprise a tRNA-like structure.

18-19. (canceled)

20. The recombinant negative-strand RNA virus genome of claim 17, wherein the tRNA-like structure comprises a tRNA variant.

21-26. (canceled)

27. The recombinant negative-strand RNA virus genome of claim 20, comprising a nucleic acid encoding a negative-strand RNA virus gene.

28-31. (canceled)

32. The recombinant negative-strand RNA virus genome of claim 1, comprising a gRNA expression cassette comprising, from 3′ to 5′;
a negative-strand RNA virus transcription initiation signal, a nucleic acid encoding a tRNA, a nucleic acid encoding a gRNA, and a transcription termination polyadenylation signal;
a negative-strand RNA virus transcription initiation signal, a nucleic acid encoding the first tRNA, a nucleic acid encoding the first gRNA, a nucleic acid encoding a second tRNA, and a transcription termination polyadenylation signal;
a negative-strand RNA virus transcription initiation signal, a nucleic acid encoding the first tRNA, a nucleic acid encoding the first gRNA, a nucleic acid encoding a second tRNA, a nucleic acid encoding a second gRNA, and a transcription termination polyadenylation signal; and/or
a negative-strand RNA virus transcription initiation signal, a nucleic acid encoding the first tRNA, a nucleic acid encoding the first gRNA, a nucleic acid encoding a second tRNA, a nucleic acid encoding a second gRNA, a nucleic acid encoding a third tRNA, and a transcription termination polyadenylation signal.

33-47. (canceled)

48. The recombinant negative-strand RNA virus genome of claim 1 wherein the negative-strand RNA virus genome is a recombinant lyssavirus genome, optionally wherein:
the recombinant lyssavirus genome is a recombinant rabies virus genome, optionally wherein:
the recombinant rabies virus genome comprises a nucleic acid encoding a therapeutic transgene, wherein:
the genome lacks:
a G gene encoding for a rabies virus glycoprotein or a functional variant thereof;
an L gene encoding for a rabies virus polymerase or a functional variant thereof; and/or
an M gene encoding for a rabies virus matrix protein or a functional variant thereof.

49-55. (canceled)

56. A positive-strand antigenome derived from the recombinant negative-strand RNA virus genome of claim 48, wherein the positive-strand antigenome comprises:
a nucleic acid encoding a first guide RNA (gRNA) that comprises a 5′ end and a 3′ end; and
a nucleic acid encoding a first transfer RNA (tRNA) positioned at one or both of the 5′ end of the nucleic acid encoding the first gRNA or the 3′ end of the nucleic acid encoding the first gRNA, optionally wherein the positive-strand antigenome is synthesized by an RNA-dependent RNA polymerase and the recombinant negative-strand RNA virus genome of claim 48.

57. (canceled)

58. A recombinant rabies virus particle, comprising a rabies virus glycoprotein and the recombinant rabies virus genome of claim 48.

59. A recombinant rabies virus particle, comprising:
a rabies virus glycoprotein; and
a recombinant rabies virus genome comprising a nucleic acid encoding a first guide RNA (gRNA) that comprises a 5′ end and a 3′ end, and
a nucleic acid encoding a first transfer RNA (tRNA) positioned at one or both of the 3′ end of the nucleic acid encoding the first gRNA or the 5′ end of the nucleic acid encoding the first gRNA.

60. The recombinant virus particle of claim 59, wherein:
the genome lacks a G gene encoding for a rabies virus glycoprotein or a functional variant thereof;
the genome lacks an L gene encoding for a rabies virus polymerase or a functional variant thereof; and/or
the genome lacks an M gene encoding for a rabies virus matrix protein or a functional variant thereof.

61-85. (canceled)

86. A pharmaceutical composition comprising the recombinant virus particle of claim 60.

87. A method for expressing a therapeutic transgene in a target cell, comprising transducing a target cell with the recombinant virus particle of claim 60.

88. A method for expressing a nucleobase editor and guide RNA (gRNA) in a target cell, comprising transducing a target cell with a recombinant rabies virus particle, wherein the recombinant virus particle comprises:
a rabies virus glycoprotein; and
a recombinant rabies virus genome comprising:
a nucleic acid encoding a nucleobase editor comprising a polynucleotide programmable nucleotide binding domain and a nucleobase editing domain;
a nucleic acid encoding a first gRNA that comprises a 5′ end and a 3′ end; and
a nucleic acid encoding a first tRNA positioned at one or both of the 3′ end of the nucleic acid encoding the first gRNA or the 5′ end of the nucleic acid encoding the first gRNA.

89. The method of claim 88, wherein:
the genome lacks a G gene encoding for a rabies virus glycoprotein or a functional variant thereof;
the genome lacks an L gene encoding for a rabies virus polymerase or a functional variant thereof; and/or
the genome lacks an M gene encoding for a rabies virus matrix protein or a functional variant thereof.

90-109. (canceled)

110. A packaging system for the recombinant preparation of a rabies virus particle, wherein the packaging system comprises:
an N gene encoding for a rabies virus nucleoprotein or a functional variant thereof;
a P gene encoding for a rabies virus phosphoprotein or a functional variant thereof;
an L gene encoding for a rabies virus polymerase or a functional variant thereof; and
a recombinant rabies virus genome, wherein:
the genome comprises a nucleic acid encoding a first guide RNA (gRNA) that comprises a 5′ end and a 3′ end; and
the genome comprises a nucleic acid encoding a first transfer RNA (tRNA) positioned at one or both of the 3′ end of the nucleic acid encoding the first gRNA or the 5′ end of the nucleic acid encoding the first gRNA.

111. The packaging system of claim 110, wherein:
the genome lacks a G gene encoding for a rabies virus glycoprotein or a functional variant thereof;
the genome lacks an L gene encoding for a rabies virus polymerase or a functional variant thereof; and/or
the genome lacks an M gene encoding for a rabies virus matrix or a functional variant thereof, optionally wherein:
the recombinant rabies virus genome further comprises a nucleic acid encoding a transgene or therapeutic transgene
the recombinant rabies virus genome is comprised within a virus genome vector, optionally wherein:
the N, P, and L genes are each comprised within a separate vector, optionally wherein:
each of the N, P, and L genes are operably linked to a transcriptional regulatory element each of the N, P, and L genes are operably linked to a transcriptional regulatory element, optionally wherein:
the transcriptional regulatory element comprises a promoter and/or enhancer, optionally wherein:
the promoter is a constitutive promoter and/or an elongation factor 1α promoter, optionally wherein:
the separate vectors are each contained within a separate transfecting plasmid, optionally wherein:
the N, P, and L genes are comprised within a single vector, optionally wherein:
the single vector comprises a first expression cassette comprising the N and P genes, and a second expression cassette comprising the L gene.

112-131. (canceled)

132. The packaging system of claim 111, further comprising:
an M gene encoding for a rabies virus matrix protein or a functional variant thereof, optionally wherein:
the M gene is comprised within a vector and/or is operably linked to a transcriptional regulatory element, optionally wherein:
the transcriptional regulatory element comprises a promoter and/or enhancer, optionally wherein:
the vector comprising the M gene is contained within a transfecting plasmid; and/or
a G gene encoding for a rabies virus glycoprotein or a functional variant thereof, optionally wherein:
the G gene is comprised within a vector and/or is operably linked to a transcriptional regulatory element, optionally wherein:
the transcriptional regulatory element comprises a promoter and/or enhancer, optionally wherein:
the vector comprising the G gene is contained within a transfecting plasmid.

133-141. (canceled)

142. A method for producing a recombinant rabies virus particle, the method comprising introducing the packaging system of claim 110 into a cell under conditions operative for enveloping the recombinant rabies virus genome to form the recombinant rabies virus particle, optionally wherein the introducing is mediated by electroporation, nucleofection, or lipofection.

143. (canceled)

144. A recombinant rabies virus particle packaging cell comprising the packaging system of claim 110.

145. A method of treating a disease or disorder in a subject, the method comprising administering the recombinant rabies virus particle of claim 60, or the pharmaceutical composition comprising the recombinant virus particle of claim 60 to the subject, optionally wherein the disease or disorder is a neurologic disease or disorder or an ophthalmic disease or disorder.

146-147. (canceled)

148. Use of the recombinant rabies virus of claim 60, or the pharmaceutical composition comprising the recombinant virus particle of claim 60, in the manufacture of a medicament for treating a disease or disorder in a subject.
